(19) United States
(12) Patent Application Publication
(10) Pub. No.: US 2025/0361500 A1
(43) Pub. Date: Nov. 27, 2025

(54) (S)-ENGINEERED OXYNITRILASE POLYPEPTIDES AND USES THEREOF

(71) Applicant: Novartis AG, Basel (CH)

(72) Inventors: Oscar ALVIZO, Redwood City, CA (US); Michael Umberto LUESCHER, Zurich (CH); Gregory MANN, Basel (CH); Benjamin MARTIN, Leymen (FR); Scott J. NOVICK, Redwood City, CA (US); Ruairi Seosamh O MEADHRA, Sierentz (FR); Theo PESCHKE, Weil am Rhein (DE); Thierry SCHLAMA, Buschwiller (FR); Lukas Christian SCHOBER, Weil am Rhein (DE); Kirsten SCHROER, Zeiningen (DE); Frederic Valentin STANGER, Colmar (FR); Nandhitha SUBRAMANIAN, Cambridge (GB); Nhat Quang Nguyen TRUNG, Galfingue (FR)

(21) Appl. No.: 18/872,024

(22) PCT Filed: Jun. 8, 2023
(86) PCT No.: PCT/IB2023/055923

§ 371 Date: Dec. 5, 2024

Related U.S. Application Data
(60) Provisional application No. 63/350,047, filed on Jun. 8, 2022.

(51) Int. Cl. C12N 9/88; C07C 213/02; C07D 213/04; C12P 13/00

(52) U.S. Cl. CPC C12N 9/88; C07C 213/02; C07D 213/04; C12P 13/008

(57) ABSTRACT

The present disclosure relates to a process for producing chiral β-nitro alcohol compounds. The invention relates in particular to an (S)-selective oxynitrilase, which enantioselectively can catalyze the Henry reaction, wherein an aldehyde or ketone compound is converted to the corresponding β-nitro alcohol compound in the presence of a nitroalkane compound and an oxynitrilase.

### CLAIM OF PRIORITY

[0001] This application claims the benefit of priority to U.S. Provisional Application No. 63/350,047 filed Jun. 8, 2022, the disclosure of which is incorporated by reference herein in its entirety.

### SEQUENCE LISTING

[0002] The instant application contains a Sequence Listing which has been submitted electronically in ST.26 format and is hereby incorporated by reference in its entirety. Said ST.26 copy, created on Jun. 7, 2023 is named PAT059273-WO-PCT_SL.xml.

### TECHNICAL FIELD

[0003] The present disclosure relates to the field of biotechnology, in particular to engineered ox ynitrilase polypeptides and their application in industrial biocatalysis. In particular, the present disclosure relates to a method for producing chiral 3-nitro alcohol compounds, wherein an aldehyde or ketone compound is converted to the corresponding β-nitro alcohol compound in the presence of a nitroalkane compound and an engineered oxynitrilase. The disclosure relates in particular to an (S)-selective oxynitrilase which enantioselectively catalyzes the Henry reaction.

### BACKGROUND ART

[0004] Biocatalytic processes have become very important to the chemical industry. Of particular importance is the use of enzymes, when the properties of biocatalysts enable either of the two enantiomers in chemical reactions with chiral or prochiral compounds to be reacted or formed preferentially.

[0005] Essential requirements for utilizing these favorable properties of enzymes are their low-cost availability in sufficient amounts, as required in industrial processes, a sufficiently high reactivity, selectivity and high stability under the realistic conditions of the industrial process.

[0006] β-nitro alcohols are precursors for β-amino alcohols, which are important chiral building blocks for the synthesis of bioactive compounds. The nitroaldol or Henry reaction is one of the classical named reactions in organic synthesis for C—C bond formation. Due to the potential to create up to two new chiral centers it is of fundamental importance for synthetic applications to be able to perform the nitroaldol addition enantio- and stereoselectively. Although the reaction has been known for more than a century (Henry, 1895), stereospecific protocols utilizing non-enzymatic organocatalysts or chiral metal catalysts have been developed only recently. The development of these methods still share a number of disadvantages, including long reaction times and sometimes extreme reaction conditions in the case of metal catalysts, or insufficient selectivities in the case of organocatalysts.

[0007] Hydroxynitrile Lyases (HNLs), often also called Oxynitrilases, belong to the enzyme class of aldehyde lyases (E.C. 4.1.2.X). In nature HNLs catalyze the reversible stereoselective cleavage of hydroxy nitriles into hydrocyanic acids and aldehydes or ketones. This cyanogenesis reaction is utilized by plants to defend against fungi or predators by releasing hydrogen cyanide in the cells. In reversal of their natural reaction, HNLs also catalyze the stereoselective addition of hydrocyanic acid to aldehydes or ketones to yield enantiopure hydroxy nitriles, which are often utilized as building blocks for various pharmaceuticals and agrochemicals (Dadashipour & Asano ACS Catalysis 2011 1 (9), 1121-1149). For the nitrile formation HNLs have shown limited substrate scope, with respect to the nature of the electrophile accepting aliphatic and aromatic aldehydes or aliphatic ketones compounds while only cyanide is accepted as nucleophile (Liu et al. Front. Bioeng. Biotechnol. 2021 9:653682).

[0008] The HNL from Hevea brasiliensis have been the first described enzyme able to catalyze an enzymatic nitroaldol (Henry) reaction of aldehydes with nitromethane (Mandana Gruber-Khadjawi et al. Adv. Synth. Catal. 2007, 349, 1445-1450). In recent years more examples of (R)-selective HNLs catalyzing the Henry reaction originating from Acidobacterium capsulatum, Granulicella tundricula (Bekerle-Bogner et al. ChemCatChem 2016, 8, 2214) or Arabidobsis thaliana (Fuhshuku et al. J. Biotechnol. 2011, 153, 153-159) have been described. Amongst these, the latter one from Arabidobsis thaliana (AtHNL) is the most widely described (Fuhshuku et al. J. Biotechnol. 2011, 153, 153-159).

[0009] Beyond HNLs also TGase (protein-glutamine-glutamyltransferase; EC 2.3.2.13) from Streptorerticillium griseoverticillatum have been described to catalyze the Henry reaction.

[0010] Therefore, the development of asymmetric synthesis of β-nitro alcohols is in great demand. There is still the need for new oxynitrilases, which can enantioselectively catalyze the Henry reaction.

[0011] The present disclosure provides a series of engineered polypeptides with high stereoselec tivity which overcomes the above-mentioned shortcomings.

### BRIEF DESCRIPTION OF THE DRAWINGS

[0012] FIG. 1A shows comparative data for the conversion of trifluoroacetone (1) and nitromethane (2) to the nitro alcohol compound (IA) with the wildtype (S)-hydroxynitrile lyase from Baliospermum montanum, Uniprot ID: D1MX73 having SEQ ID NO: 606 versus the engineered polypeptide SEQ ID NO: 2.

[0013] FIG. 1B shows comparative data for the enantiomeric excess in the reaction of trifluoroacetone (1) and nitromethane (2) to give the nitro alcohol compound (IA) with the wildtype (S)-hydroxynitrile lyase from Baliospermum montanum, Uniprot ID: D1MX73 having SEQ ID NO: 606 versus the engineered polypeptide SEQ ID NO: 2.

[0014] FIG. 2A shows comparative conversion data for the most active polypeptides from each evolution round for the reaction of trifluoroacetone (1) and nitromethane (2) to produce the nitro alcohol compound (IA), under the reaction conditions described in Example 13.

[0015] FIG. 2B shows comparative enantiomeric excess data for the most active polypeptides from each evolution round for the reaction of trifluoroacetone (1) and nitromethane (2) to produce the nitro alcohol compound (IA), under the reaction conditions described in Example 13.

[0016] FIG. 2C shows comparative conversion data for the most active polypeptides from each evolution round for the reaction of trifluoroacetone (1) and nitromethane (2) to produce the nitro alcohol compound (IA), under the reaction conditions described in Example 13.

[0017] FIG. 2D shows comparative enantiomeric excess data for the most active polypeptides from each evolution round for the reaction of trifluoroacetone (1) and nitromethane (2) to produce the nitro alcohol compound (IA), under the reaction conditions described in Example 13.

[0018] FIG. 3A shows the activity of the free enzyme compared to the immobilized enzymes on either amino or epoxy carrier.

[0019] FIG. 3B shows the selectivity of the free enzyme compared to the immobilized enzymes on either amino or epoxy carrier.

[0020] FIG. 4 shows the residue difference of the claimed oxynitrilase polypeptides relative to SEQ ID No: 606 and SEQ ID No: 2.

### SUMMARY OF THE DISCLOSURE

[0021] The present disclosure provides engineered polypeptides with high stereoselectivity, high catalytic activity and good stability, which can asymmetrically synthesize β-nitro alcohols, and in particular asymmetrically synthesize (S)-1,1,1-trifluoro-2-methyl-3-nitropropan-2-ol. The disclosure relates in particular to an (S)-selective oxynitrilase, which can enantioselectively catalyze the Henry reaction.

[0022] Surprisingly, the engineered polypeptides of the disclosure are particularly amenable to substrates comprising electron withdrawing groups. As a result, it has been found that β-nitro alcohol products can be synthesized in a high yield with high stereoselectivity by introducing an electron withdrawing substituent in the aldehyde or ketone substrate.

[0023] The present disclosure also provides gene sequences of engineered polypeptides, recombinant expression vectors comprising the genes, engineered strains and efficient methods for the production thereof, as well as reaction processes for the asymmetric synthesis of β-nitro alcohols using engineered polypeptides.

[0024] The engineered oxynitrilase polypeptides disclosed herein have improved catalytic properties. Through substitutions, insertions, or deletions of a number of amino acid residues in directed evolution processes, these engineered polypeptides were derived from a wild-type oxynitrilase which is less stereoselective towards the product. The wild-type oxynitrilase is from Baliospermum montanum (BmHNL), which consists of 263 amino acids and has the sequence shown in SEQ ID No: 606 (also accessible under accession number D1MX73 in UniProt). The wild-type oxynitrilase showed low stereoselectivity for the product. In the reaction of 1,1,1-trifluoropropan-2-one with nitromethane to produce (S)-1,1,1-trifluoro-2-methyl-3-nitropropan-2-ol (i.e., (IA)) using SEQ ID No: 606, the enantiomeric excess (i.e., ee) for IA was <2%.

[0025] In a first aspect, there is provided an oxynitrilase polypeptide, which is a polypeptide of (a) or (b) below:
[0026] (a) a polypeptide comprising an amino acid sequence selected from the group consisting of SEQ ID NOs: 4 to 604, and 608 to 640; or
[0027] (b) a polypeptide having oxynitrilase activity, which comprises an amino acid sequence having (i) at least 80% sequence identity to one of the polypeptides recited in (a), and (ii) a substitution, deletion, addition or insertion of one or more amino acid residues relative to said one amino acid sequence recited in (a).

[0028] In a second aspect, there is provided an oxynitrilase polypeptide, which is capable of coupling 1,1,1-trifluoropropan-2-one with nitromethane to produce (S)-1,1,1-trifluoro-2-methyl-3-nitropropan-2-ol, under suitable reaction conditions, at greater stereoselectivity and/or activity than that of SEQ ID NO: 606.

[0029] In a third aspect, there is provided an oxynitrilase polypeptide comprising an amino acid sequence having at least 80% sequence identity to SEQ ID NO: 606, which is, under suitable reaction conditions, capable of coupling 1,1,1-trifluoropropan-2-one with nitromethane to produce (S)-1,1,1-trifluoro-2-methyl-3-nitropropan-2-ol in an enantiomeric excess of at least 60%, 70%, 80%, 85%, 90%, 91%, 92%, 93%, 94%, 95%, 96%, 97%, 98%, 99% or more.

[0030] In a further aspect, there is provided a polypeptide immobilized on a solid material by chemical bond or a physical adsorption method, wherein the polypeptide is selected from the oxynitrilase polypeptides according to the disclosure.

[0031] In a further aspect, there is provided a polynucleotide encoding a polypeptide of the disclosure.

[0032] In a further aspect, there is provided an expression vector comprising a polynucleotide according to the disclosure.

[0033] In a further aspect, there is provided a host cell comprising the expression vector of the disclosure, wherein the host cell is preferably E. coli.

[0034] In a further aspect, there is provided a method of preparing an oxynitrilase polypeptide, which comprises the steps of culturing the host cell according the disclosure and obtaining an oxynitrilase polypeptide from the culture.

[0035] In a further aspect, there is provided an oxynitrilase catalyst obtainable by culturing the host cells of the disclosure, wherein said oxynitrilase catalyst comprises cells or culture fluid containing the oxynitrilase polypeptides, or an article processed therewith, wherein the article refers to an extract obtained from the culture of transformant cell, an isolated product obtained by isolating or purifying an oxynitrilase from the extract, or an immobilized product obtained by immobilizing transformant cell, an extract thereof, or isolated product of the extract.

[0036] In a further aspect, there is provided a process for the asymmetric synthesis of a β-nitro alcohol using an oxynitrilase polypeptide, the process comprising the step of contacting a nitroalkane and an aldehyde or ketone substrate with the oxynitrilase polypeptide, to obtain a β-nitro alcohol product.

[0037] In a further aspect, there is provided a process for the asymmetric synthesis of a β-nitro alcohol using the herein disclosed engineered oxynitrilase polypeptides, the process comprising the step of contacting a nitroalkane and an aldehyde or ketone substrate with the oxynitrilase polypeptide of the present disclosure, to obtain a β-nitro alcohol product.

[0038] In a further aspect, there is provided a process a process for the asymmetric synthesis of (S)-1,1,1-trifluoro-2-methyl-3-nitropropan-2-ol (IA):

[chemical structure]

the process comprising the step of contacting nitromethane and 1,1,1-trifluoropropan-2-one with the oxynitrilase polypeptide according to the present disclosure, to obtain (S)-1,1,1-trifluoro-2-methyl-3-nitropropan-2-ol of formula (IA).

[0039] In a further aspect, there is provided a process for synthesizing (S)-3-amino-1,1,1-trifluoro-2-methylpropan-2-ol of formula (IB):

[chemical structure]

the process comprising the step of contacting (IA) with hydrogen under suitable hydrogenation conditions, to obtain (S)-3-amino-1,1,1-trifluoro-2-methylpropan-2-ol (IB), wherein (IA) is synthesized by the process according to according to the present disclosure.

[0040] In a further aspect, there is provided a process for synthesizing (S)-3-amino-6-methoxy-N-(3,3,3-trifluoro-2-hydroxy-2-methylpropyl)-5-(trifluoromethyl)picolinamide of formula (IC)

[chemical structure]

the process comprising the step of contacting nitromethane and 1,1,1-trifluoropropan-2-one with the oxynitrilase polypeptide according to the present disclosure, to obtain (S)-1,1,1-trifluoro-2-methyl-3-nitropropan-2-ol of formula (IA).

### DETAILED DESCRIPTION

[0041] The present disclosure describes the directed evolution of a HNL to obtain nitro alcohols in excellent yields and enantiomeric excesses even at equimolar ratios of the substrates. It is the first description of a HNL accepting ketones as substrates for a Henry reaction and also the first S-selective Oxynitrilase catalyzing the Henry reaction. The HNLs originate from the organism Baliospermum montanum (BmHNL) also never have been described to be able to catalyze the Henry reaction. A series of engineered polypeptides with high S-stereoselectivity is provided.

[0042] These engineered polypeptides were developed through directed evolution towards the se lection of (S)-1,1,1-trifluoro-2-methyl-3-nitropropan-2-ol, a compound of formula (IA) as defined herein.

[0043] The present disclosure describes engineered polypeptides originating from BmHNL, catalyzing the Henry reaction of trifluoroacetone (1) and nitromethane (2) to produce the nitro alcohol compound (IA). All so far described Oxynitrilase need large excess of the nitro compound from 10 to even 45-fold to reach decent conversion >50% leading to a poor atom efficiency (<20%) and economic feasibility of these processes while the newly described polypeptide can reach >80% conversion and >80% ee at equimolar conditions or 100% conversion and >90% ee with 1.2-fold excess of the substrate nitromethane (2). It is the first description of a HNL accepting ketones as substrates for a Henry reaction and also the first described highly S-Selective Oxynitrilase catalyzing the Henry reaction with an ee >80%.

[0044] The present disclosure also provides a process for the asymmetric synthesis of a β-nitro alcohol using the herein disclosed engineered oxynitrilase polypeptides, the process comprising the step of contacting a nitroalkane and an aldehyde or ketone substrate with the oxynitrilase polypeptide of the present disclosure, to obtain a β-nitro alcohol product.

[0045] In particular, the present disclosure provides a process for the asymmetric synthesis of (S)-1,1,1-trifluoro-2-methyl-3-nitropropan-2-ol (IA), which process stereoselectively produces the desired (S) enantiomer over the (R) enantiomer.

[chemical structure]

Compound (IA), i.e., (S)-1,1,1-trifluoro-2-methyl-3-nitropropan-2-ol, is an intermediate in the synthesis of

[chemical structure]

i.e., (S)-3-amino-6-methoxy-N-(3,3,3-trifluoro-2-hydroxy-2-methylpropyl)-5-(trifluoromethyl)picolinamide, also referred to herein as (IC), for the treatment of cystic fibrosis.

[0046] The enzymatic synthesis of compound (IA) presents an attractive alternative to traditional chemical synthesis. The use of enzyme biocatalysts may also reduce chemical waste and allow to shorten the overall number of steps required in the synthesis.

### Definitions

[0047] Unless expressly defined otherwise, technical and scientific terms used in this disclosure have the meanings that are commonly understood by people skilled in the art to which this invention belongs. The following references provide one of skill with a general definition of many of the terms used in this invention: Singleton et al., Dictionary of Microbiology and Molecular Biology (2nd ed. 1994); The Cambridge Dictionary of Science and Technology (Walker ed., 1988); The Glossary of Genetics, 5th Ed., R. Rieger et al. (eds.), Springer Verlag (1991); and Hale & Marham, The Harper Collins Dictionary of Biology (1991). As used herein, the following terms have the meanings ascribed to them below, unless specified otherwise. The abbreviations used for the genetically encoded amino acids are conventional and are as follows:

| Amino Acid | Three-Letter | One-Letter Abbreviation |
|---|---|---|
| Alanine | Ala | A |
| Arginine | Arg | R |
| Asparagine | Asn | N |
| Aspartate | Asp | D |
| Cysteine | Cys | C |
| Glutamate | Glu | E |
| Glutamine | Gln | Q |
| Glycine | Gly | G |
| Histidine | HIS | H |
| Isoleucine | Ile | I |
| Leucine | Leu | L |
| Lysine | Lys | K |
| Methionine | Met | M |
| Phenylalanine | Phe | F |
| Proline | Pro | P |
| Serine | Ser | S |
| Threonine | Thr | T |
| Tryptophan | Trp | W |
| Tyrosine | Tyr | Y |
| Valine | Val | V |

[0048] For a deletion of an amino acid a “−” was used and for a Stop Codon a “*”. When the three-letter abbreviations are used, unless specifically preceded by an “L” or a “D” or clear from the context in which the abbreviation is used, the amino acid may be in either the L- or D-configuration about α-carbon (C). For example, whereas “Ala” designates alanine without specifying the configuration about the α-carbon, “D-Ala” and “L-Ala” designate D-alanine and L-alanine, respectively.

[0049] When the one-letter abbreviations are used, upper case letters designate amino acids in the L-configuration about the α-carbon and lower case letters designate amino acids in the D-configuration about the α-carbon. For example, “A” designates L-alanine and “a” designates D-alanine. When polypeptide sequences are presented as a string of one-letter or three-letter abbreviations (or mixtures thereof), the sequences are presented in the amino (N) to carboxy (C) direction in accordance with common convention.

[0050] The abbreviations used for the genetically encoding nucleotides are conventional and are as follows: adenosine (A); guanosine (G); cytidine (C); thymidine (T); and uridine (U). Unless specifically delineated, the abbreviated nucleotides may be either ribonucleotides or 2′-deoxyribonucleotides. The nucleotides may be specified as being either ribonucleotides or 2′-deoxyribonucleotides on an individual basis or on an aggregate basis. When nucleic acid sequences are presented as a string of one-letter abbreviations, the sequences are presented in the 5′ to 3′ direction in accordance with common convention, and the phosphates are not indicated.

[0051] “Amino acid difference” or “residue difference” refers to the difference in amino acid residues at a position of a polypeptide sequence relative to the amino acid residue at a corresponding position in the reference sequence. The positions of amino acid differences are generally referred to herein as “Xn”, where n refers to the corresponding position in the reference sequence on which the residue differences are based. For example, “a residue difference at position X2 as compared to SEQ ID NO: 2” refers to the difference in amino acid residues at the polypeptide position corresponding to position 2 of SEQ ID NO: 2. Thus, if the reference polypeptide of SEQ ID NO: 2 has a leucine at position 2, then “a residue difference at position X2 as compared to SEQ ID NO: 2” refers to an amino acid substitution of any residue other than leucine at the position of the polypeptide corresponding to position 2 of SEQ ID NO: 2. In most of the examples herein, the specific amino acid residue difference at the position is indicated as “XnY”, wherein “Xn” specified to the corresponding position as described above, and “Y” is the single letter identifier of the amino acid found in the engineered polypeptide (i.e., a different residue than in the reference polypeptide). In some examples (e.g., in FIG. 4), the present disclosure also provides specific amino acid differences denoted by the conventional notation “AnB”, where A is a single letter identifier of a residue in the reference sequence, “n” is the number of residue position in the reference sequence, and B is the single letter identifier for the residue substitution in the sequence of the engineered polypeptide. In some examples, an engineered polypeptide of this disclosure may comprise one or more amino acid residue differences relative to a reference sequence, which is indicated by a list of specific positions at which residue differences are present relative to a reference sequence. In some embodiments, more than one amino acid residue can be used in a specific residue position of an engineered polypeptide, the various amino acid residues that can be used are separated by a “/” (e.g., X38F/X38F). “Deletion” refers to the modification of a polypeptide by removing one or more amino acids from a reference polypeptide. Deletions can include the removal of one or more amino acids, two or more amino acids, five or more amino acids, ten or more amino acids, fifteen or more amino acids, or twenty or more amino acids, up to 10% of the total number of amino acids of the enzyme, or up to 20% of the total number of amino acids making up the reference enzyme while retaining the enzymatic activity of the engineered oxynitrilase and/or retaining the improved properties of the engineered oxynitrilase. Deletion may involve the internal portion and/or the terminal portion of the polypeptide. In various embodiments, deletions may include a contiguous segment or may be discontinuous.

[0052] The term “and/or” means either “and” or “or” unless indicated otherwise.

[0053] “Coding sequence” refers to that portion of a nucleic acid (e.g., a gene) that encodes an amino acid sequence of a protein.

[0054] A “comparison window” refers to a conceptual segment of at least about 20 contiguous nucleotide positions or amino acid residues, wherein the sequence may be compared to a reference sequence of at least 20 contiguous nucleotides or amino acids and wherein the portions of the sequence in the comparison window may comprise additions or deletions (i.e., gaps) of 20% or less as compared to a reference sequence (which does not comprise additions or deletions) for optimal alignment of the two sequences. The comparison window can be longer than 20 contiguous residues, and optionally include 30, 40, 50, 100 or more residues.

[0055] Unless specified otherwise, the terms “compounds of the present disclosure,” “compounds of the disclosure,” or “compound of the disclosure” refer to compounds of formulae (1), (2), (I), (I-i), (II), (III), (IA), (IB), (IB).HCl, (IC), (ID), E1, E3, E4, E5, E6, exemplified compounds, salts thereof, particularly pharmaceutically acceptable salts thereof, hydrates, solvates, prodrugs, as well as all stereoisomers (including diastereoisomers and enantiomers), rotamers, tautomers, and isotopically labeled compounds (including deuterium substitutions), as well as inherently formed moieties.

[0056] “Conversion” refers to the enzymatic transformation of a substrate to the corresponding product. “Percent conversion” or “conversion” refers to the percentage of substrate that is converted to product within a period of time under the specified conditions. Thus, “enzymatic activity” or “activity” of an oxynitrilase polypeptide can be expressed as the “percent conversion” of the substrate to the product.

[0057] In the context of the numbering for a given amino acid or polynucleotide sequence, “corresponding to, ““reference to” or “relative to” refers to the numbering of the residues of a specified reference when the given amino acid or polynucleotide sequence is compared to the reference sequence. In other words, the residue number or residue position of a given sequence is designated with respect to the reference sequence, rather than by the actual numerical position of the residue within the given amino acid or polynucleotide sequence. For example, a given amino acid sequence such as an engineered oxynitrilase can be aligned to a reference sequence by introducing gaps to optimize residue matches between the two sequences. In these cases, although there are gaps, the numbering of the residue in a given amino acid or polynucleotide sequence is made with respect to the reference sequence to which they have been aligned.

[0058] The term “electron withdrawing substituent”, as used herein, refers to a substituent that has a strong electron withdrawing force. Exemplary electron withdrawing groups include, without limitation, halogen atoms such as fluorine atom, haloalkyl groups such as trifluoromethyl group, carboxyl group, alkoxycarbonyl groups such as methoxycarbonyl group, aryloxycarbonyl groups such as phenoxycarbonyl group, acyl groups such as acetyl group, acyloxy groups such as acetoxy group, cyano group, aryl groups, alkenyl groups, nitro group, sulfo group, alkanesulfonyl groups, alkanesulfinyl groups, and alkoxysulfonyl groups, including any of the substituents disclosed herein, such as alkyl, alkenyl, alkynyl, aryl, hetereoaryl, heterocyclyl, cycloalkyl, and arylalkyl groups containing these electron withdrawing groups as substituents. Among them, preferred examples are fluorine-containing groups such as fluorine atom and trifluoromethyl group, acyloxy groups such as acetoxy group, cyano group, nitro group, sulfo group, alkylsulfonyl groups, e.g., C₁-C₆alkylsulfonyl, alkylsulfinyl groups, e.g., C₁-C₆alkylsulfinyl, and alkoxysulfonyl groups, e.g., C₁-C₆alkoxylsulfonyl.

[0059] The terms “Engineered oxynitrilase”, “engineered oxynitrilase polypeptide”, “oxynitrilase polypeptide”, “improved oxynitrilase polypeptide”, and “engineered polypeptide” are used interchangeably herein.

[0060] “Fragment” as used herein refers to a polypeptide having an amino terminal and/or carboxyl terminal deletion, but where the remaining amino acid sequence is identical to the corresponding position in the sequence. Fragments may be at least 10 amino acids long, at least amino acids long, at least 50 amino acids long or longer, and up to 70%, 80%, 90%, 95%, 98% and 99% of the full length oxynitrilase polypeptide.

[0061] “Improved enzyme properties” refers to an enzyme property that is better or more desirable for a specific purpose as compared to a reference oxynitrilase such as a wild-type oxynitrilase or another improved engineered oxynitrilase. Improved enzyme properties are exhibited by engineered oxynitrilase polypeptides in this disclosure. Enzyme properties that are expected to be improved include, but are not limited to, enzyme activity (which can be expressed as a percentage of substrate conversion), thermal stability, solvent stability, pH activity characteristics, cofactor requirements, tolerance to inhibitors (e.g., substrate or product inhibition), stereospecificity and stereoselectivity (including enantioselectivity and diastereoselectivity).

[0062] “Insertion” refers to the modification of a polypeptide by adding one or more amino acids from a reference polypeptide. In some embodiments, the improved engineered oxynitrilase comprises insertions of one or more amino acids to a naturally-occurring oxynitrilase polypeptide as well as insertions of one or more amino acids to other engineered oxynitrilase polypeptides. It can be inserted in the internal portions of the polypeptide or inserted to the carboxyl or amino terminus. As used herein, insertions include fusion proteins known in the art. The insertion can be a contiguous segment of amino acids or separated by one or more amino acids in naturally-occurring or engineered polypeptides.

[0063] An “isolated polypeptide” refers to a polypeptide that is substantially separated from other substances with which it is naturally associated, such as proteins, lipids, and polynucleotides. The term comprises polypeptides that have been removed or purified from their naturally occurring environment or expression system (e.g., in host cells or in vitro synthesis). Engineered oxynitrilase polypeptides may be present in the cell, in the cell culture medium, or prepared in various forms, such as lysates or isolated preparations. As such, in some embodiments, the engineered oxynitrilase polypeptide may be an isolated polypeptide.

[0064] “Naturally occurring” or “wild-type” refers to the form found in nature. For example, a naturally-occurring or wild-type polypeptide or polynucleotide sequence is a sequence that is present in an organism that can be isolated from sources in nature and which has not been intentionally modified by manual procedures.

[0065] “Oxynitrilase” or “HNL” as used herein, refers to a wild-type or engineered enzyme having oxynitrilase activity.

[0066] The terms “Polynucleotide” and “nucleic acid” are used interchangeably herein.

[0067] The terms “Protein”, “polypeptide” and “peptide” are used interchangeably herein to denote a polymer of at least two amino acids covalently linked by an amide bond, regardless of length or post-translational modification (e.g., glycosylation, phosphorylation, lipidation, myristoylation, ubiquitination, etc.). This definition includes D-amino acids and L-amino acids, as well as mixtures of D-amino acids and L-amino acids. Preferably, the amino acids have L configuration.

[0068] “Recombinant” or “engineered” or “non-naturally occurring” when used with reference to, for example, a cell, nucleic acid or polypeptide, refers to a material or material corresponding to the native or native form of the material, that has been modified in a manner that would not otherwise exist in nature, or is identical thereto but produced or derived from synthetic material and/or by manipulation using recombinant techniques.

[0069] “Reference sequence” refers to a defined sequence that is used as a basis for sequence comparison. The reference sequence may be a subset of a larger sequence, for example, a full-length gene or a fragment of a polypeptide sequence. In general, a reference sequence is at least nucleotides or amino acid residues in length, at least 25 residues long, at least 50 residues in length, or the full length of the nucleic acid or polypeptide. Because two polynucleotides or polypeptides may each (1) comprise a sequence (i.e., a portion of the complete sequence) that is similar between two sequences, and (2) may further comprise sequences that is divergent between the two sequences, sequence comparisons between two (or more) polynucleotides or polypeptides are typically performed by comparing the sequences of the two polynucleotides or polypeptides over a “comparison window” to identify and compare local regions of sequence similarity. In some embodiments, a “reference sequence” is not intended to be limited to a wild-type sequence, and may comprise engineered or altered sequences. For example, “a reference sequence with proline at the residue corresponding to X35 based on SEQ ID NO: 2” refers to a reference sequence wherein the corresponding residue at position X35 in SEQ ID NO: 2 which is alanine, has been altered to proline.

[0070] “Sequence identity” and “homology” are used interchangeably herein to refer to comparisons between polynucleotide sequences or polypeptide sequences (“sequence identity” and “homology” are generally expressed as a percentage), and are determined by comparing two optimally aligned sequences over a comparison window, where the portion of the polynucleotide or polypeptide sequence in the comparison window may comprise additions or deletions (i.e., gaps) as compared to the reference sequence for optimal alignment of the two sequences. The percentage can be calculated by determining the number of positions at which either the identical nucleic acid base or amino acid residue occurs in both sequences or a nucleic acid base or amino acid residue is aligned with a gap to yield the number of matched positions, dividing the number of matched positions by the total number of positions in the window of comparison and multiplying the result by 100 to yield the percentage of sequence identity. Those skilled in the art will appreciate that there are many established algorithms available to align two sequences. The optimal alignment of sequences for comparison can be conducted, for example, by the local homology algorithm of Smith and Waterman, 1981, Adv. Appl. Math. 2: 482, by the Homology alignment algorithm of Needleman and Wunsch, 1970, J. Mol. Biol. 48: 443, by the search for similarity method of Pearson and Lipman, 1988, Proc. Natl. Acad. Sci. USA 85: 2444, by computerized implementations of these algorithms (GAP, BESTFIT, FASTA, and TFASTA in the GCG Wisconsin Package) or by visual inspection (see generally, Current Protocols in Molecular Biology, F M Ausubel et al. eds., Current Protocols, a Joint Venture between Greene Publishing Associates, Inc. and John Wiley &Sons, Inc., (1995 Supplement) (Ausubel)). Examples of algorithms that are suitable for determining the percent sequence identity and percent sequence similarity are the BLAST and BLAST 2.0 algorithms, which are described in Altschul et al., 1990, J. Mol. Biol. 215: 403-410 and Altschul et al., 1977, Nucleic Acids Res. 3389-3402, respectively. Software for performing BLAST analysis is publicly available through the National Center for Biotechnology Information website. The algorithm involves first identifying high scoring sequence pairs (HSPs) by identifying short words of length W in the query sequence, which either match or satisfy some positive-valued threshold scores T when aligned with a word of the same length in the database sequence. T is referred to as, the neighborhood word score threshold (Altschul et al., Supra). These initial neighborhood word hits serve as seeds for initiating searches to find longer HSPs that contain them. The word hits are then extended in both directions along each sequence for as far as the cumulative alignment score can be increased. For nucleotide sequences, the cumulative scores are calculated using the parameters M (reward score for matched pair of residues; always>0) and N (penalty score for mismatched residues; always <0). For amino acid sequences, a scoring matrix is used to calculate the cumulative score. The extension of the word hits in each direction are halted when: the cumulative alignment score falls off by the quality X from its maximum achieved value; the cumulative score goes 0 or below, due to the accumulation of one or more negative-scoring residue alignments; or the end of either sequence is reached. The BLAST algorithm parameters W, T and X determine the sensitivity and speed of the alignment. The BLASTN program (for nucleotide sequences) uses as defaults a wordlength (W) of 11, the expected value (E) of 10, M=5, N=−4, and a comparison of both strands as a default value. For amino acid sequences, the BLASTP program uses as defaults the wordlength (W) of 3, the expected value (E) of 10 and the BLOSUM62 scoring matrix (see Henikoff and Henikoff, 1989, Proc Natl Acad Sci USA 89: 10915). Exemplary determination of sequence alignments and % sequence identity can employ the BESTFIT or GAP programs in the GCG Wisconsin Software package (Accelrys, Madison WI), using the default parameters provided.

[0071] “Solvent-stable” refers to an oxynitrilase polypeptide that maintains similar activity (for example more than 50% to 80%) after exposure to varying solvent (ethanol, isopropanol, dimethylsulfoxide, tetrahydrofuran, 2-Methyltetrahydrofuran, acetone, toluene, butyl acetate, methyl tert-butyl ether, etc.) for a period of time (e.g., 0.5-24 hours).

[0072] “Stereoisomers”, and similar expressions are used interchangeably herein to refer to all isomers resulting from a difference in orientation of atoms in their space only. It includes enantiomers and compounds that have more than one stereocenter and are not mirror images of one another (i.e., diastereomers).

[0073] “Stereoselectivity” refers to the preferential formation of one stereoisomer over the other in a chemical or enzymatic reaction. Stereoselectivity can be partial, with the formation of one stereoisomer is favored over the other; or it may be complete where only one stereoisomer is formed. When the stereoisomers are enantiomers, the stereoselectivity is referred to as enantioselectivity. It is often reported as “enantiomeric excess” (ee for short). When the stereoisomers are diastereomers, the stereoselectivity is referred to as diastereoselectivity. It is often reported as “diastereomeric excess” (de for short). The fraction, typically a percentage, is generally reported in the art as the enantiomeric excess (i.e., ee) derived therefrom according to the following formula: [major enantiomer−minor enantiomer]/[major enantiomer+minor enantiomer].

[0074] “Suitable reaction conditions” refer to those conditions (e.g., catalyst loading, substrate loading, temperature, solvent, etc.) in the reaction system, under which the substrate is converted to the desired product.

[0075] “Suitable reaction conditions” in the context of the biocatalytic processes of the present disclosure refer to those conditions (e.g., enzyme loading, substrate loading, cofactor loading, temperature, pH, buffer, co-solvent, etc.) in the biocatalytic reaction system, under which the oxynitrilase polypeptide of the present disclosure can convert a substrate to a desired product compound. Exemplary “suitable reaction conditions” are provided in the present disclosure and illustrated by examples.

[0076] “Thermostable” means that an oxynitrilase polypeptide that retains similar activity (e.g., greater than 50%) after being exposed to an elevated temperature (e.g., 30-85° C.) for a period of time (e.g., 0.5-24 h).

[0077] Furthermore, the use of a term designating a monovalent radical where a divalent radical is appropriate shall be construed to designate the respective divalent radical and vice versa. Unless otherwise specified, conventional definitions of terms control and conventional stable atom valences are presumed and achieved in all formulas and groups. The articles “a” and “an” refer to one or more than one (e.g., to at least one) of the grammatical object of the article. By way of example, “an element” means one element or more than one element.

[0078] The term “substituted” means that the specified group or moiety bears one or more suitable substituents wherein the substituents may connect to the specified group or moiety at one or more positions. For example, an aryl substituted with a cycloalkyl may indicate that the cycloalkyl connects to one atom of the aryl with a bond or by fusing with the aryl and sharing two or more common atoms.

[0079] In the groups, radicals, or moieties defined below, the number of carbon atoms is often specified preceding the group, for example, C₁-C₈alkyl means an alkyl group or radical having 1 to 8 carbon atoms. In general, for groups comprising two or more subgroups, the last named group is the radical attachment point, for example, “alkylaryl” means a monovalent radical of the formula alkyl-aryl-, while “arylalkyl” means a monovalent radical of the formula aryl-alkyl-. The term “halogen” or “halo” means fluorine, chlorine, bromine or iodine. The term “nitro” shall mean the radical —NO₂.

[0080] The term “alkyl” as used herein represents a saturated, branched or straight hydrocarbon group, e.g., having from 1 to 50 carbon atoms, e.g., C₁-C₃ alkyl, C₁-C₆ alkyl, C₂-C₈-alkyl, C₃-C₈-alkyl, C₁-C₈-alkyl, C₁-C₁₀ alkyl, C₁-C₂₀ alkyl, C₁-C₃₀ alkyl, C₁-C₄₀ alkyl, C₁-C₅₀ alkyl, and the like. Representative examples are methyl, ethyl, propyl (e.g., prop-1-yl, prop-2-yl (or iso-propyl)), butyl (e.g., 2-methylprop-2-yl (or tert-butyl), but-1-yl, but-2-yl), pentyl (e.g., pent-1-yl, pent-2-yl, pent-3-yl), 2-methylbut-1-yl, 3-methylbut-1-yl, hexyl (e.g., hex-1-yl), heptyl (e.g., hept-1-yl), octyl (e.g., oct-1-yl), nonyl (e.g., non-1-yl), and the like. The term “C₁-C₆ alkyl” is to be interpreted accordingly.

[0081] The term “alkenyl” as used herein represents a branched or straight hydrocarbon group having at least one double bond, e.g., having from respectively 2 to 50 carbon atoms and at least one double bond, e.g., C₂-C₃alkenyl, C₂-C₆ alkenyl, C₂-C₇ alkenyl, C₂-C₅ alkenyl, C₃-C₅ alkenyl, C₁-C₁₀-alkenyl, C₁-C₂₀ alkenyl, C₁-C₃₀ alkenyl, C₁-C₄₀ alkenyl, C₁-C₅₀ alkenyl, and the like.

[0082] Representative examples are ethenyl (or vinyl), propenyl (e.g., prop-1-enyl, prop-2-enyl), butadienyl (e.g., buta-1,3-dienyl), butenyl (e.g., but-1-en-1-yl, but-2-en-1-yl), pentenyl (e.g., pent-1-en-1-yl, pent-2-en-2-yl), hexenyl (e.g., hex-1-en-2-yl, hex-2-en-1-yl), 1-ethylprop-2-enyl, 1,1-(dimethyl)prop-2-enyl, 1-ethylbut-3-enyl, 1,1-(dimethyl)but-2-enyl, and the like.

[0083] The term “alkynyl” as used herein represents a branched or straight hydrocarbon group having at least one triple bond, e.g., having from respectively 2 to 50 carbon atoms and at least one triple bond, e.g., C₂-C₃ alkynyl, C₂-C₆ alkynyl, C₂-C₇ alkynyl, C₂-C₅ alkynyl, C₃-C₅ alkynyl, C₁-C₁₀ alkynyl, C₁-C₂₀ alkynyl, C₁-C₃₀ alkynyl, C₁-C₄₀ alkynyl, C₁-C₅₀ alkynyl, and the like. Representative examples are ethynyl, propynyl (e.g., prop-1-ynyl, prop-2-ynyl), butynyl (e.g., but-1-ynyl, but-2-ynyl), pentynyl (e.g., pent-1-ynyl, pent-2-ynyl), hexynyl (e.g., hex-1-ynyl, hex-2-ynyl), 1-ethylprop-2-ynyl, 1,1-(dimethyl)prop-2-ynyl, 1-ethylbut-3-ynyl, 1,1-(dimethyl)but-2-ynyl, and the like.

[0084] The term “aryl” as used herein is intended to include monocyclic, bicyclic or polycyclic carbocyclic aromatic rings. Representative examples are phenyl, naphthyl (e.g., naphth-1-yl, naphth-2-yl), anthryl (e.g., anthr-1-yl, anthr-9-yl), phenanthryl (e.g., phenanthr-1-yl, phenanthr-9-yl), and the like. Aryl is also intended to include monocyclic, bicyclic or polycyclic carbocyclic aromatic rings substituted with carbocyclic aromatic rings. Representative examples are biphenyl (e.g., biphenyl-2-yl, biphenyl-3-yl, biphenyl-4-yl), phenylnaphthyl (e.g., 1-phenylnaphth-2-yl, 2-phenylnaphth-1-yl), and the like. Aryl is also intended to include partially saturated bicyclic or polycyclic carbocyclic rings with at least one unsaturated moiety (e.g., a benzo moiety). Representative examples are, indanyl (e.g., indan-1-yl, indan-5-yl), indenyl) (e.g., inden-1-yl, inden-5-yl), 1,2,3,4-tetrahydronaphthyl (e.g., 1,2,3,4-tetrahydronaphth-1-yl, 1,2,3,4-tetrahydronaphth-2-yl, 1,2,3,4-tetrahydronaphth-6-yl), 1,2-dihydronaphthyl (e.g., 1,2-dihydronaphth-1-yl, 1,2-dihydronaphth-4-yl, 1,2-dihydronaphth-6-yl), fluorenyl (e.g., fluoren-1-yl, fluoren-4-yl, fluoren-9-yl), and the like. Aryl is also intended to include partially saturated bicyclic or polycyclic carbocyclic aromatic rings containing one or two bridges. Representative examples are, benzonorbornyl (e.g., benzonorborn-3-yl, benzonorborn-6-yl), 1,4-ethano-1,2,3,4-tetrahydronapthyl (e.g., 1,4-ethano-1,2,3,4-tetrahydronapth-2-yl, 1,4-ethano-1,2,3,4-tetrahydronapth-10-yl), and the like. Aryl is also intended to include partially saturated bicyclic or polycyclic carbocyclic aromatic rings containing one or more spiro atoms. Representative examples are spiro[cyclopentane-1,1′-indane]-4-yl, spiro[cyclopentane-1,1′-indene]-4-yl, spiro[piperidine-4,1′-indane]-1-yl, spiro[piperidine-3,2′-indane]-1-yl, spiro[piperidine-4,2′-indane]-1-yl, spiro[piperidine-4,1′-indane]-3′-yl, spiro[pyrrolidine-3,2′-indane]-1-yl, spiro[pyrrolidine-3,1′-(3′,4′-dihydronaphthalene)]-1-yl, spiro[piperidine-3,1′-(3′,4′-dihydronaphthalene)]-1-yl, spiro[piperidine-4,1′-(3′,4′-dihydronaphthalene)]-1-yl, spiro[imidazolidine-4,2′-indane]-1-yl, spiro[piperidine-4,1′-indene]-1-yl, and the like.

[0085] The term C₆-C₁₄ aryl is to be interpreted accordingly.

[0086] Preferably, aryl refers to a monocyclic or bicyclic carbocyclic aromatic ring.

[0087] The term “arylalkyl” (e.g., benzyl, phenylethyl, β-phenylpropyl, 1-naphtylmethyl, 2-(1-naphtyl)ethyl and the like) represents an aryl group as defined above attached through an alkyl chain having the indicated number of carbon atoms or substituted alkyl group as defined above. The term C₇-C₂₀ arylalkyl is to be construed accordingly.

[0088] Preferred examples of aryl include, but are not limited to, phenyl and naphthyl. In an embodiment, aryl is phenyl.

[0089] As used herein, the term “cycloalkyl” means a monocyclic or polycyclic saturated or partially unsaturated carbon ring, e.g., containing 3-20 carbon atoms e.g., containing 3-18 carbon atoms, wherein there are no delocalized pi electrons (aromaticity) shared among the ring carbon. The terms “C₃-C₂₀cycloalkyl”, and “C₃-C₁₀cycloalkyl” are to be construed accordingly. The term polycyclic encompasses bridged (e.g., norbonane), fused (e.g., decalin) and spirocyclic cycloalkyl. Preferably, cycloalkyl, e.g., “C₃-C₂₀cycloalkyl” and “C₃-C₁₅cycloalkyl”, is a monocyclic or spirocyclic hydrocarbon group of 3 to 20 and 3 to 18 carbon atoms, respectively.

[0090] Representative examples are spiro[2.5]octanyl, spiro[4.5]decanyl, cyclopropenyl, cyclopropyl, cyclobutyl, cyclobutenyl, cyclopentyl, cyclohexyl, cycloheptanyl, cyclooctanyl, spiro[2.3]hexanyl, spiro[3.3]heptyl, spiro[3.4]octanyl, spiro[3.5]nonanyl, spiro[4.5]decanyl, spiro[5.5]undecanyl, spiro[4.4]nonanyl, bicyclo[2.2.2]octanyl, bicyclo[2.2.2]octenyl, bicyclo[1.1.1]pentanyl, decahydronaphthalenyl, bicyclo[3.3.0]octanyl, adamantyl, norbornanyl, norbornenyl, nortricyclyl, bicycle-[3.2.1]octanyl, tricyclo[5.2.1.0^{2,6}]decanyl, bicyclo[2.2.1]heptyl, and the like.

[0091] As used herein, the term “fluoroalkyl” refers to straight chain or branched alkyl groups, as defined above, where some or all of the hydrogen atoms of these groups are replaced by fluorine atoms. The term C₁-C₆fluoroalkyl is to be construed accordingly. Examples include, without limitation, fluoromethyl, difluoromethyl, trifluoromethyl, 1-fluoroethyl, 2-fluoroethyl, 2,2-difluoroethyl, 2,2,2-trifluoroethyl, pentafluoroethyl, 3,3,3-trifluoroprop-1-yl, 1,1,1-trifluoroprop-2-yl, heptafluoroisopropyl, 1-fluorobzutyl, 2-fluorobutyl, 3-fluorobbutyl, 4-fluorobutyl, 4,4,4-trifluorobutyl, fluoro-tert-butyl, and the like.

[0092] As used herein, the term “haloalkyl” refers to an alkyl radical, as defined above, substituted by one or more halo radicals, as defined herein. The terms C₁-C₂₀haloalkyl and C₁-C₆haloalkyl are to be construed accordingly. Examples of haloalkyl include, but are not limited to, trifluoromethyl, difluoromethyl, fluoromethyl, trichloromethyl, 1,1-difluoroethyl, 2,2-difluoroethyl, 2,2,2-trifluoroethyl, 2-fluoropropyl, 1,1,1-trifluoropropyl, 2,2-difluoropropyl, 3,3-difluoropropyl and 1-fluoromethyl-2-fluoroethyl, 1,3-dibromopropan-2-yl, 3-bromo-2-fluoropropyl, 1,1,2,2-tetrafluoropropyl, and 1,4,4-trifluorobutan-2-yl.

[0093] As used herein, the term “heteroaryl” is intended to include monocyclic heterocyclic aromatic rings containing one or more heteroatoms selected from oxygen, nitrogen, and sulfur (0, N, and S). Representative examples are pyrrolyl, furanyl, thienyl, oxazolyl, thiazolyl, imidazolyl, pyrazolyl, isothiazolyl, isooxazolyl, triazolyl, (e.g., 1,2,4-triazolyl), oxadiazolyl, (e.g., 1,2,3-oxadiazolyl, 1,2,4-oxadiazolyl, 1,2,5-oxadiazolyl, 1,3,4-oxadiazolyl), thiadiazolyl (e.g., 1,2,3-thiadiazolyl, 1,2,4-thiadiazolyl, 1,2,5-thiadiazolyl, 1,3,4-thiadiazolyl), tetrazolyl, pyranyl, pyridinyl, pyridazinyl, pyrimidinyl, pyrazinyl, 1,2,3-triazinyl, 1,2,4-triazinyl, 1,3,5-triazinyl, thiadiazinyl, azepinyl, azecinyl, and the like.

[0094] Heteroaryl is also intended to include bicyclic heterocyclic aromatic rings containing one or more heteroatoms selected from oxygen, nitrogen, and sulfur (0, N, and S). Representative examples are indolyl, isoindolyl, benzofuranyl, benzothiophenyl, indazolyl, benzopyranyl, benzimidazolyl, benzothiazolyl, benzisothiazolyl, benzoxazolyl, benzisoxazolyl, benzoxazinyl, benzotriazolyl, naphthyridinyl, phthalazinyl, pteridinyl, purinyl, quinazolinyl, cinnolinyl, quinolinyl, isoquinolinyl, quinoxalinyl, oxazolopyridinyl, isooxazolopyridinyl, pyrrolopyridinyl, furopyridinyl, thienopyridinyl, imidazopyridinyl, imidazopyrimidinyl, pyrazolopyridinyl, pyrazolopyrimidinyl, pyrazolotriazinyl, thiazolopyridinyl, thiazolopyrimidinyl, imdazothiazolyl, triazolopyridinyl, triazolopyrimidinyl, and the like.

[0095] Heteroaryl is also intended to include polycyclic heterocyclic aromatic rings containing one or more heteroatoms selected from oxygen, nitrogen, and sulfur (0, N, and S). Representative examples are carbazolyl, phenoxazinyl, phenazinyl, acridinyl, phenothiazinyl, carbolinyl, phenanthrolinyl, and the like.

[0096] Heteroaryl is also intended to include partially saturated monocyclic, bicyclic or polycyclic heterocyclyls containing one or more heteroatoms selected oxygen, nitrogen, and sulfur (0, N, and S). Representative examples are imidazolinyl, indolinyl, dihydrobenzofuranyl, dihydrobenzothienyl, dihydrobenzopyranyl, dihydropyridooxazinyl, dihydrobenzodioxinyl (e.g., 2,3-dihydrobenzo[b][1,4]dioxinyl), benzodioxolyl (e.g., benzo[d][1,3]dioxole), dihydrobenzooxazinyl (e.g., 3,4-dihydro-2H-benzo[b][1,4]oxazine), tetrahydroindazolyl, tetrahydrobenzimidazolyl, tetrahydroimidazo[4,5-c]pyridyl, tetrahydroquinolinyl, tetrahydroisoquinolinyl, tetrahydroquinoxalinyl, and the like.

[0097] The heteroaryl ring structure may be substituted by one or more substituents. The substituents can themselves be optionally substituted. The heteroaryl ring may be bonded via a carbon atom or heteroatom.

[0098] The term “5-20 membered heteroaryl” is to be construed accordingly.

[0099] The term “monocyclic heteroaryl” as used herein is intended to include monocyclic heterocyclic aromatic rings as defined above.

[0100] The term “bicyclic heteroaryl” as used herein is intended to include bicyclic heterocyclic aromatic rings as defined above.

[0101] Examples of 5-20 membered heteroaryl include, but are not limited to, indolyl, imidazopyridyl, isoquinolinyl, benzooxazolonyl, pyridinyl, pyrimidinyl, pyridinonyl, benzotriazolyl, pyridazinyl, pyrazolotriazinyl, indazolyl, benzimidazolyl, quinolinyl, triazolyl, (e.g., 1,2,4-triazolyl), pyrazolyl, thiazolyl, oxazolyl, isooxazolyl, pyrrolyl, oxadiazolyl, (e.g., 1,2,3-oxadiazolyl, 1,2,4-oxadiazolyl, 1,2,5-oxadiazolyl, 1,3,4-oxadiazolyl), imidazolyl, pyrrolopyridinyl, tetrahydroindazolyl, quinoxalinyl, thiadiazolyl (e.g., 1,2,3-thiadiazolyl, 1,2,4-thiadiazolyl, 1,2,5-thiadiazolyl, 1,3,4-thiadiazolyl), pyrazinyl, oxazolopyridinyl, pyrazolopyrimidinyl, benzoxazolyl, indolinyl, isooxazolopyridinyl, dihydropyridooxazinyl, tetrazolyl, dihydrobenzodioxinyl (e.g., 2,3-dihydrobenzo[b][1,4]dioxinyl), benzodioxolyl (e.g., benzo[d][1,3]dioxole) and dihydrobenzooxazinyl (e.g., 3,4-dihydro-2H-benzo[b][1,4]oxazine).

[0102] The term “heterocyclyl” as used herein represents a saturated or partially saturated monocyclic or polycyclic ring containing one or more heteroatoms selected from nitrogen, oxygen, sulfur, S(═O) and S(═O)₂, and wherein there are no delocalized pi electrons (aromaticity) shared among the ring carbon or heteroatoms. The heterocyclyl ring structure may be substituted by one or more substituents. The substituents can themselves be optionally substituted. The heterocyclyl may be bonded via a carbon atom or heteroatom. The term polycyclic encompasses bridged, fused and spirocyclic heterocyclyl.

[0103] Representative examples are aziridinyl (e.g., aziridin-1-yl), azetidinyl (e.g., azetidin-1-yl, azetidin-3-yl), oxetanyl, pyrrolidinyl (e.g., pyrrolidin-1-yl, pyrrolidin-2-yl, pyrrolidin-3-yl), imidazolidinyl (e.g., imidazolidin-1-yl, imidazolidin-2-yl, imidazolidin-4-yl), oxazolidinyl (e.g., oxazolidin-2-yl, oxazolidin-3-yl, oxazolidin-4-yl), thiazolidinyl (e.g., thiazolidin-2-yl, thiazolidin-3-yl, thiazolidin-4-yl), isothiazolidinyl, piperidinyl (e.g., piperidin-1-yl, piperidin-2-yl, piperidin-3-yl, piperidin-4-yl), homopiperidinyl (e.g., homopiperidin-1-yl, homopiperidin-2-yl, homopiperidin-3-yl, homopiperidin-4-yl), piperazinyl (e.g., piperazin-1-yl, piperazin-2-yl), morpholinyl (e.g., morpholin-2-yl, morpholin-3-yl, morpholin-4-yl), thiomorpholinyl (e.g., thiomorpholin-2-yl, thiomorpholin-3-yl, thiomorpholin-4-yl), 1-oxothiomorpholinyl, 1,1-dioxo-thiomorpholinyl, tetrahydrofuranyl (e.g., tetrahydrofuran-2-yl, tetrahydrofuran-3-yl), tetrahydrothienyl, tetrahydro-1,1-dioxothienyl, tetrahydropyranyl (e.g., 2-tetrahydropyranyl), tetrahydrothiopyranyl (e.g., 2-tetrahydrothiopyranyl), 1,4-dioxanyl, 1,3-dioxanyl, and the like. Heterocyclyl is also intended to represent a saturated 6 to 8 membered bicyclic ring containing one or more heteroatoms selected from nitrogen, oxygen, sulfur, S(═O) and S(═O)₂. Representative examples are octahydroindolyl (e.g., octahydroindol-1-yl, octahydroindol-2-yl, octahydroindol-3-yl, octahydroindol-5-yl), decahydroquinolinyl (e.g., decahydroquinolin-1-yl, decahydroquinolin-2-yl, decahydroquinolin-3-yl, decahydroquinolin-4-yl, decahydroquinolin-6-yl), decahydroquinoxalinyl (e.g., decahydroquinoxalin-1-yl, decahydroquinoxalin-2-yl, decahydroquinoxalin-6-yl) and the like. Heterocyclyl is also intended to represent a saturated 6 to 8 membered ring containing one or more heteroatoms selected from nitrogen, oxygen, sulfur, S(═O) and S(═O)₂ and having one or two bridges. Representative examples are 3-azabicyclo[3.2.2]nonyl, 2-azabicyclo[2.2.1]heptyl, 3-azabicyclo[3.1.0]hexyl, 2,5-diazabicyclo[2.2.1]heptyl, atropinyl, tropinyl, quinuclidinyl, 1,4-diazabicyclo[2.2.2]octanyl, and the like. Heterocyclyl is also intended to represent a 6 to 8 membered saturated ring containing one or more heteroatoms selected from nitrogen, oxygen, sulfur, S(═O) and S(═O)₂ and containing one or more spiro atoms. Representative examples are 1,4-dioxaspiro[4.5]decanyl (e.g., 1,4-dioxaspiro[4.5]decan-2-yl, 1,4-dioxaspiro[4.5]decan-7-yl), 1,4-dioxa-8-azaspiro[4.5]decanyl (e.g., 1,4-dioxa-8-azaspiro[4.5]decan-2-yl, 1,4-dioxa-8-azaspiro[4.5]decan-8-yl), 8-azaspiro[4.5]decanyl (e.g., 8-azaspiro[4.5]decan-1-yl, 8-azaspiro[4.5]decan-8-yl), 2-azaspiro[5.5]undecanyl (e.g., 2-azaspiro[5.5]undecan-2-yl), 2,8-diazaspiro[4.5]decanyl (e.g., 2,8-diazaspiro[4.5]decan-2-yl, 2,8-diazaspiro[4.5]decan-8-yl), 2,8-diazaspiro[5.5]undecanyl (e.g., 2,8-diazaspiro[5.5]undecan-2-yl), 1,3,8-triazaspiro[4.5]decanyl (e.g., 1,3,8-triazaspiro[4.5]decan-1-yl, 1,3,8-triazaspiro[4.5]decan-3-yl, 1,3,8-triazaspiro[4.5]decan-8-yl), and the like.

[0104] The term “β- to 14-membered heterocyclyl” is to be construed accordingly.

[0105] As used herein, the term “optional” or “optionally substituted” means that the described event or circumstance may or may not occur; for example, “optionally substituted aryl” refers to an aryl group that may or may not be substituted. This description includes both substituted aryl groups and unsubstituted aryl groups.

[0106] The term “pharmaceutically acceptable” is defined as being suitable for administration to humans without adverse events.

[0107] As used herein, the terms “sponge Nickel and sponge Cobalt” are intended to refer to nickel and cobalt catalysts having a skeletal structure formed from a nickel or cobalt alloy. Typically, these catalysts are formed from nickel or cobalt alloyed with aluminum and the aluminum subsequently removed. Included with the terms sponge nickel and sponge cobalt are the trademarked and well known Raney nickel and Raney cobalt catalysts.

[0108] Certain of the defined terms may occur more than once in the structural formulae, and upon such occurrence each term shall be defined independently of the other.

### Oxynitilases of the Disclosure

[0109] In another aspect, the oxynitrilase polypeptides disclosed herein can asymmetrically couple aldehyde or ketone substrates and nitroalkane substrates.

[0110] In some embodiments, engineered oxynitrilase polypeptides of the present disclosure are capable of converting 1,1-trifluoropropan-2-one and nitromethane to produce (S)-1,1,1-trifluoro-2-methyl-3-nitropropan-2-ol (i.e., (IA)) at a stereoselectivity at least equal to or greater than that of SEQ ID No: 606 and/or SEQ ID No: 2. The engineered oxynitrilase polypeptides of the present disclosure are capable of producing the β-nitro alcohol product, e.g., compound IA, in an enantiomeric excess of at least 60%, 65%, 70%, 75%, 80%, 85%, 90%, 91%, 92%, 93%, 94%, 95%, 96%, 97%, 98% or 99%.

In some embodiments, the engineered oxynitrilase polypeptides are capable of converting 1,1-trifluoropropan-2-one and nitromethane to produce (S)-1,1,1-trifluoro-2-methyl-3-nitropropan-2-ol (i.e., (IA)) at a stereoselectivity higher than that of the polypeptide of SEQ ID NO: 606 under suitable reaction conditions, e.g., those disclosed herein. The engineered oxynitrilase polypeptides comprise an amino acid sequence that is at least 80%, 85%, 86%, 87%, 88%, 89%, 90%, 91%, 92%, 93%, 94%, 95%, 96%, 97%, 98%, 99% or more identical to the sequence of SEQ ID NO: 4, 6, 8, 10, 12, 14, 16, 18, 20, 22, 24, 26, 28, 30, 32, 34, 36, 38, 40, 42, 44, 46, 48, 50, 52, 54, 56, 58, 60, 62, 64, 66, 68, 70, 72, 74, 76, 78, 80, 82, 84, 86, 88, 90, 92, 94, 96, 98, 100, 102, 104, 106, 108, 110, 112, 114, 116, 118, 120, 122, 124, 126, 128, 130, 132, 134, 136, 138, 140, 142, 144, 146, 148, 150, 152, 154, 156, 158, 160, 162, 164, 166, 168, 170, 172, 174, 176, 178, 180, 182, 184, 186, 188, 190, 192, 194, 196, 198, 200, 202, 204, 206, 208, 210, 212, 214, 216, 218, 220, 222, 224, 226, 228, 230, 232, 234, 236, 238, 240, 242, 244, 246, 248, 250, 252, 254, 256, 258, 260, 262, 264, 266, 268, 270, 272, 274, 276, 278, 280, 282, 284, 286, 288, 290, 292, 294, 296, 298, 300, 302, 304, 306, 308, 310, 312, 314, 316, 318, 320, 322, 324, 326, 328, 330, 332, 334, 336, 338, 340, 342, 344, 346, 348, 350, 352, 354, 356, 358, 360, 362, 364, 366, 368, 370, 372, 374, 376, 378, 380, 382, 384, 386, 388, 390, 392, 394, 396, 398, 400, 402, 404, 406, 408, 410, 412, 414, 416, 418, 420, 422, 424, 426, 428, 430, 432, 434, 436, 438, 440, 442, 444, 446, 448, 450, 452, 454, 456, 458, 460, 462, 464, 466, 468, 470, 472, 474, 476, 478, 480, 482, 484, 486, 488, 490, 492, 494, 496, 498, 500, 502, 504, 506, 508, 510, 512, 514, 516, 518, 520, 522, 524, 526, 528, 530, 532, 534, 536, 538, 540, 542, 544, 546, 548, 550, 552, 554, 556, 558, 560, 562, 564, 566, 568, 570, 572, 574, 576, 578, 580, 582, 584, 586, 588, 590, 592, 594, 596, 598, 600, 602, 604, 608, 610, 612, 614, 616, 618, 620, 622, 624, 626, 628, 630, 632, 634, 636, 638, and 640. The identity between two amino acid sequences or two nucleotide sequences can be obtained by commonly used algorithms in the art and can be calculated according to default parameters by using NCBI Blastp and Blastn software, or by using the Clustal W algorithm (Nucleic Acid Research, 22 (22): 4673-4680, 1994). For example, using the Clustal W algorithm, the amino acid sequence identity of SEQ ID NO: 4 to SEQ ID NO: 606 is 92.78%.

[0111] The engineered oxynitrilase polypeptides represented by SEQ ID NO: 4 to 604, and 608 to 640 exhibit higher activity and/or stereoselectivity than that of SEQ ID NO: 606, as shown in the Examples.

[0112] In some embodiments, engineered oxynitrilase polypeptides comprise an amino acid sequence with insertions of one or more than one amino acid residues in SEQ ID NO: 2 and having oxynitrilase activity. For each and every embodiment of the engineered oxynitrilase polypeptides of the present disclosure, the insertion fragment may comprise 1 or more amino acids, 2 or more amino acids, 3 or more amino acids, 4 or more amino acids, 5 or more amino acids, 6 or more amino acids, 8 or more amino acids, 10 or more amino acids, 15 or more amino acids, or 20 or more amino acids, where the relevant functional and/or improved properties of the engineered oxynitrilase described herein are maintained. The insertion fragment can be inserted at the amino terminus or carboxy terminus, or the internal portion of the oxynitrilase polypeptide. In some embodiments, the insertion fragments may comprise 1-2, 1-3, 1-4, 1-5, 1-6, 1-7, 1-8, 1-9, 1-10, 1-15, 1-20, 1-21, 1-22, 1-23, 1-24, 1-25, 1-30, 1-35, 1-40, 1-45, 1-50, 1-55, or 1-60 amino acid residues. In some embodiments, the number of insertion occurrence can be 1, 2, 3, 4, 5, 6, 7, 8, 9, 10, 11, 12, 13, 14, 15, 16, 17, 18, 19, 20, 21, 22, 23, 24, 25, 26, 27, 28, 29, 30, 35, 40, 45, 50, 55, 60 or more. In some embodiments, the insertion fragments may comprise 1, 2, 3, 4, 5, 6, 7, 8, 9, 10, 11, 12, 13, 14, 15, 16, 17, 18, 19, 20, 21, 22, 23, 24, 25 or more amino acid residues.

[0113] In some embodiments, the engineered oxynitrilase polypeptides comprise an amino acid sequence that differs from the sequence of SEQ ID NO: 2 in one or more residue positions selected from: X2, X12, X28, X29, X32, X39, X50, X55, X64, X105, X111, X147, X152, X154, X160, X185, X196, X203, X208, X209, X232, X233, and X250. In some embodiments, the engineered oxynitrilase polypeptides comprise an amino acid sequence comprising at least one of the following features (these features are substitutions of amino acid residues to the reference sequence of SEQ ID NO: 2: VX12I; SX28G; AX29W; NX32T; WX39F; WX39V; QX50E; QX50D; RX55G; LX64A; AX105G; DX111S; EX147K; TX152L; NX160M; TX185R; SX196G; YX203C; QX208R; QX208S; IX209V; SX232G; AX233G; or QX250G.

[0114] In a particular embodiment, the engineered oxynitrilase polypeptides comprise an amino acid sequence that differs from the sequence of SEQ ID NO: 2 in one or more residue positions selected from: X39, X105, and X154. In a particular embodiment, the engineered oxynitrilase polypeptides comprise an amino acid sequence comprising at least one of the following features (these features are substitutions of amino acid residues to the reference sequence of SEQ ID NO: 2): WX39F; WX39V; or AX105G.

[0115] In some embodiments, the engineered oxynitrilase polypeptides comprise an amino acid sequence that differs from the sequence of SEQ ID NO: 606 in one or more residue positions selected from: X2, X11, X12, X28, X29, X32, X33, X39, X43, X44, X46, X50, X55, X64, X80, X103, X105, X111, X118, X121, X147, X152, X154, X160, X172, X180, X185, X196, X203, X208, X209, X232, X233, X238, X241, X250, and X263. In some embodiments, the engineered oxynitrilase polypeptides comprise an amino acid sequence comprising at least one of the following features (these features are substitutions of amino acid residues to the reference sequence of SEQ ID NO: 606): TX11S; IX12V; SX28G; AX29W; NX32T; AX33V; VX39F, IX43S; DX44N; RX46H; QX50E; QX50D; EX55R; EX55G; LX64A; SX80A; HX103V; AX105G; DX111S; YX118V; FX121Y; EX147K; TX152L; NX160M; LX172R; EX180L; TX185R; SX196G; YX203C; QX208R; QX208S; IX209V; SX232G; AX233G; QX238M; KX241R; QX250G; or AX263S.

[0116] In a particular embodiment, the engineered oxynitrilase polypeptides comprise an amino acid sequence that differs from the sequence of SEQ ID NO: 606 in one or more residue positions selected from: X2, X105, X111, X154, X160, X185, X209, X232, and X250. In a particular embodiment, the engineered oxynitrilase polypeptides comprise an amino acid sequence comprising at least one of the following features (these features are substitutions of amino acid residues to the reference sequence of SEQ ID NO: 606): AX105G; DX111S; NX160M; TX185R; IX209V; SX232G; or QX250G.

[0117] In another aspect, this disclosure provides polynucleotides comprising sequences encoding engineered oxynitrilase polypeptides, expression vectors and host cells capable of expressing engineered oxynitrilase polypeptides. In some embodiments, the host cell can be a bacterial host cell, such as E. coli. The host cell can be used to express and isolate the engineered oxynitrilase described herein, or alternatively be directly used in the reaction for conversion of substrates to products.

[0118] In some embodiments, the engineered oxynitrilase in the form of whole cell, crude extract, isolated enzyme, or purified enzyme can be used alone or in an immobilized form, such as immobilization on a resin.

Polynucleotides, Control Sequences, Expression Vectors and Host Cells that can be Used to Produce Engineered Oxynitrilase Polypeptides

[0119] In another aspect, this disclosure provides polynucleotides encoding engineered polypeptides having oxynitrilase activity described herein. The polynucleotides can be linked to one or more heterologous regulatory sequences that control gene expression to produce recombinant polynucleotides that are capable of expressing the engineered polypeptides. Expression constructs comprising a heterologous polynucleotide encoding an engineered oxynitrilase may be introduced into a suitable host cell to express the corresponding engineered oxynitrilase polypeptide.

[0120] As apparent to one skilled in the art, the availability of protein sequences and knowledge of codons corresponding to a variety of amino acids provide an illustration of all possible polynucleotides that encode the protein sequence of interest. The degeneracy of the genetic code, in which the same amino acid is encoded by selectable or synonymous codons, allows for the production of an extremely large number of polynucleotides, all of which encode the engineered oxynitrilase polypeptides disclosed herein. Thus, upon determination of a particular amino acid sequence, one skilled in the art can generate any number of different polynucleotides by modifying one or more codons in a manner that does not alter the amino acid sequence of the protein. In this regard, this disclosure specifically contemplates each and every possible alteration of a polynucleotide that can be made by selecting a combination based on possible codon selections, for any of the polypeptides disclosed herein, comprising those amino acid sequences of exemplary engineered polypeptides listed in Examples 6 to 12 and 19, and any of the polypeptides disclosed as even sequence identifiers of SEQ ID NOS: 4 to 604, and 608 to 640 in the Sequence Listing incorporated by reference.

[0121] In various embodiments, the codons are preferably selected to accommodate the host cell in which the recombinant protein is produced. For example, codons preferred for bacteria are used to express genes in bacteria; codons preferred for yeast are used to express genes in yeast; and codons preferred for mammals are used for gene expression in mammalian cells.

[0122] In some embodiments, the polynucleotides encode polypeptides comprising amino acid sequences that are at least about 80%, 85%, 86%, 87%, 88%, 89%, 90%, 91%, 92%, 93%, 94%, 95%, 96%, 97%, 98%, 99%, or more identical to a reference sequence that is an even sequence identifier of SEQ ID NO: 4 to 604, and 608 to 640. Wherein the polypeptides have oxynitrilase activity and one or more of the improved properties described herein, for example, the ability to convert 1,1,1-trifluoropropan-2-one to compound (IA) with increased stereoselectivity compared to the polypeptide of SEQ ID NO: 2 and/or 606.

[0123] In some embodiments, the polynucleotides encode engineered oxynitrilase polypeptides comprising amino acid sequences having a percentage of identity described above and having one or more amino acid residue differences as compared to SEQ ID NO: 606.

[0124] In some embodiments, the present disclosure provides engineered polypeptides having oxynitrilase activity, wherein the engineered polypeptide has at least 80% sequence identity to the reference sequence of SEQ ID NO: 2 and comprises a combination of residue difference that is selected from the following positions: X2, X12, X28, X29, X32, X39, X50, X55, X64, X105, X111, X147, X152, X154, X160, X185, X196, X203, X208, X209, X232, X233, X250.

[0125] In some embodiments, the polynucleotides encoding the engineered oxynitrilase polypeptides comprise sequences having odd sequence identifier of SEQ ID NO: 3 to 603, and 607 to 639.

[0126] In some embodiments, the polynucleotides encode polypeptides as described herein; but at the nucleotide level, the polynucleotides have about 50%, 55%, 60%, 65%, 70%, 75%, 80%, 85%, 86%, 87%, 88%, 89%, 90%, 91%, 92%, 93%, 94%, 95%, 96%, 97%, 98%, 99%, or more sequence identity to reference polynucleotides encoding engineered oxynitrilase polypeptides as described herein. In some embodiments, the reference polynucleotides are selected from the sequences having the odd sequence identifiers of SEQ ID NOs: 3 to 603, and 607 to 639.

[0127] The isolated polynucleotides encoding engineered oxynitrilase polypeptides can be manipulated to enable the expression of the engineered polypeptides in a variety of ways, which comprises further modification of the sequences by codon optimization to improve expression, insertion into suitable expression elements with or without additional control sequences, and transformation into a host cell suitable for expression and production of the engineered polypeptides.

[0128] Depending on the expression vector, manipulation of the isolated polynucleotide prior to insertion of the isolated polynucleotide into the vector may be desirable or necessary. Techniques for modifying polynucleotides and nucleic acid sequences using recombinant DNA methods are well known in the art. Guidance is provided below: Sambrook et al., 2001, Molecular Cloning: A Laboratory Manual, Third Edition, Cold Spring Harbor Laboratory Press; and Current Protocols in Molecular Biology, Ausubel. F. Eds., Greene Pub. Associates, 1998, 2010 Year update.

[0129] In another aspect, this disclosure also relates to recombinant expression vectors, depending on the type of host they are to be introduced into, including a polynucleotide encoding an engineered oxynitrilase polypeptide or variant thereof, and one or more expression regulatory regions, such as promoters and terminators, origin of replication and the like. Alternatively, the nucleic acid sequence of the present disclosure can be expressed by inserting the nucleic acid sequence or the nucleic acid construct comprising the sequence into an appropriate expression vector. In generating the expression vector, the coding sequence is located in the vector such that the coding sequence is linked to a suitable control sequence for expression. The recombinant expression vector can be any vector (e.g., a plasmid or virus) that can be conveniently used in recombinant DNA procedures and can result in the expression of a polynucleotide sequence. The choice of vector will generally depend on the compatibility of the vector with the host cell to be introduced into. The vector can be linear or closed circular plasmid. The expression vector may be an autonomously replicating vector, i.e., a vector that exists as an extrachromosomal entity whose replication is independent of chromosomal replication such as plasmids, extrachromosomal elements, minichromosomes, or artificial chromosomes. The vector may contain any tools for ensuring self-copying. Alternatively, the vector may be a vector that, when introduced into a host cell, integrates into the genome and replicates with the chromosome into which it is integrated. Moreover, a single vector or plasmid or two or more vectors or plasmids that together comprise the total DNA to be introduced into the genome of the host cell may be used.

[0130] Many expression vectors useful to the embodiments of the present disclosure are commercially available. An exemplary expression vector can be prepared by inserting a polynucleotide encoding an engineered oxynitrilase polypeptide to plasmid pACYC-Duet-1 (Novagen), pBR322 Vector (New England Biolabs), pUC19 Vector(New England Biolabs) or pET T7 Expression Vectors (Novagen).

[0131] In another aspect, this disclosure provides host cells comprising polynucleotides encoding engineered oxynitrilase polypeptides of the present disclosure. The polynucleotide is linked to one or more control sequences for expression of oxynitrilase polypeptides in a host cell. Host cells for expression of polypeptides encoded by the expression vectors of the present disclosure are well known in the art, including, but not limited to, bacterial cells such as E. coli, Streptomyces, and Salmonella typhimurium; fungals (e.g., Saccharomyces cerevisiae or Pichia pastoris); insect cells such as Drosophila S2 and Spodoptera Sf9; animal cells such as CHO, COS, BHK, 293 and Bowes melanoma cells; and plant cells. An exemplary host cell is E. coli BL21 (DE3). The above host cells may be wild-type or may be engineered cells through genomic edition, such as knockout of the wild-type oxynitrilase gene carried in the host cell's genome. Suitable media and growth conditions for the above host cells are well known in the art.

[0132] Polynucleotides used to express engineered oxynitrilases can be introduced into cells by a variety of methods known in the art. Techniques comprise, among others, electroporation, bio-particle bombardment, liposome-mediated transfection, calcium chloride transfection, and protoplast fusion. Different methods of introducing polynucleotides into cells are known to those skilled in the art.

### Process of Producing an Engineered Oxynitrilase Polypeptide

[0133] Engineered oxynitrilase can be obtained by subjecting a polynucleotide encoding an oxynitrilase to mutagenesis and/or directed evolution. An exemplary directional evolution technique can be found in “Biocatalysis for the Pharmaceutical Industry: Discovery, Development, and Manufacturing” (2009 John Wiley &Sons Asia (Pte) Ltd. ISBN: 978-0-470-82314-9).

[0134] When the sequence of an engineered polypeptide is known, the encoding polynucleotide may be prepared by standard solid-phase methods according to known synthetic methods. In some embodiments, fragments of up to about 100 bases can be synthesized separately and then ligated (e.g., by enzymatic or chemical ligation methods or polymerase-mediated methods) to form any desired contiguous sequence. For example, the polynucleotides and oligonucleotides of the present disclosure can be prepared by chemical synthesis using, for example, the classic phosphoramidite methods described by Beaucage et al., 1981, Tet Lett 22: 1859-69, or Matthes et al. People, 1984, EMBO J. 3: 801-05, as typically practiced in automated synthesis methods. According to the phosphoramidite method, oligonucleotides are synthesized, purified, annealed, ligated, and cloned into a suitable vector, for example, in an automated DNA synthesizer. In addition, essentially any nucleic acid is available from any of a variety of commercial sources.

[0135] In some embodiments, the present disclosure also provides a process for preparing or producing an engineered oxynitrilase polypeptide that is capable of converting 1,1,1-trifluoropropan-2-one to Compound (IA) under suitable reaction conditions, wherein the process comprises culturing a host cell capable of expressing a polynucleotide encoding an engineered polypeptide under culture conditions suitable for the expression of the polypeptide. In some embodiments, the process of preparing a polypeptide further comprises isolating the polypeptide. Engineered polypeptides may be expressed in suitable cells and isolated (or recovered) from the host cell and/or culture medium using any one or more of the well-known techniques for protein purification, the techniques for protein purification include, among others, lysozyme treatment, sonication, filtration, salting out, ultracentrifugation and chromatography.

### Methods of Using an Engineered Oxynitrilase and Compounds Prepared Therewith

[0136] The present disclosure also provides a process of preparing a wide range of compounds or structural analogs thereof using an engineered oxynitrilase polypeptide disclosed herein.

[0137] Thus, the present disclosure provides a process for the asymmetric synthesis of a β-nitro alcohol using an engineered oxynitrilase polypeptide disclosed herein, the process comprising the step of contacting a nitroalkane and an aldehyde or ketone substrate with the oxynitrilase polypeptide disclosed herein, to obtain a β-nitro alcohol product.

[0138] The choice of applicable electrophiles ranges from aromatic to heteroaromatic and aliphatic aldehydes and ketones. Depending on the substrate and reaction systems yields up to at least 90% or enantiomeric excess >99% could be obtained by the process of the disclosure.

[0139] In an embodiment, the aldehyde or ketone substrate comprises an electron withdrawing substituent.

[0140] In an embodiment, the present disclosure also provides a process for the asymmetric synthesis of a β-nitro alcohol using the herein disclosed engineered oxynitrilase polypeptides, the resulting β-nitro alcohol having the structure shown in formula (I):

[chemical structure]

[0141] wherein:
[0142] R¹ and R² are each independently selected from H, alkyl, e.g., C₁-C₂₀alkyl, alkenyl, e.g., C₂-C₂₀alkenyl, alkynyl, e.g., C₂-C₂₀alkynyl, cycloalkyl, e.g., C₃-C₁₀cycloalkyl, aryl, e.g., C₆-C₁₄aryl, arylalkyl, e.g., C₇-C₂₀arylalkyl, heterocyclyl, e.g., 3-14 membered heterocyclyl, and heteroaryl, e.g., 5-20 membered heteroaryl,
[0143] wherein the alkyl, alkenyl, and alkynyl are each optionally substituted by one or more R^{a} e.g., one to six R^{a},
[0144] wherein the cycloalkyl, aryl, arylalkyl, heterocyclyl, and heteroaryl are each optionally substituted by one or more R^{b}, e.g., one to six R^{b};
[0145] R³ and R⁴ are each independently selected from H and alkyl, e.g., C₁-C₂₀alkyl, wherein the alkyl, e.g., C₁-C₂₀alkyl, is optionally substituted by one or more R^{b}, e.g., one to six R^{b};
[0146] each R^{a} is at each occurrence independently selected from cycloalkyl, e.g., C₃-C₁₀cycloalkyl, aryl, e.g., C₆-C₁₄aryl, arylalkyl, e.g., C₇-C₂₀arylalkyl, heterocyclyl, e.g., 3-14 membered heterocyclyl, and heteroaryl, e.g., 5-20 membered heteroaryl, halogen, e.g., F, haloalkyl, e.g., C₁-C₂₀haloalkyl, e.g., —CF₃, —CN, —OR^{c}, —NR^{c}R^{c}, —(CH₂)ₙCOOR^{c}, —(CH₂)ₙ—C(═O)R^{c}, —(CH₂)ₙ—C(═O)NR^{c}R^{c};
[0147] each R^{b} is at each occurrence independently selected from halogen, e.g., F, haloalkyl, e.g., C₁-C₂₀haloalkyl, e.g., —CF₃, —CN, —NO₂, —OR^{c}, —NR^{c}R^{c}, —(CH₂)ₙCOOR^{c}, —(CH₂)ₙ—C(═O)R^{c}, —(CH₂)ₙ—C(═O)NR^{c}R^{c}, C₁-C₂₀alkyl, C₂-C₂₀alkenyl, or C₂-C₂₀alkynyl;
[0148] each R^{c} is at each occurrence independently selected from H, C₁-C₂₀alkyl, C₂-C₂₀alkenyl, and C₂-C₂₀alkynyl, each optionally substituted by one or more R^{b}, e.g., one to six R^{b}; and
[0149] n is 0, 1, 2, 3, 4, 5 or 6, e.g., 0, 1, 2 or 3;
[0150] the process comprising the step of contacting a nitroalkane of formula (II), which is R³R⁴CHNO₂, and an aldehyde or ketone substrate, with an oxynitrilase polypeptide as disclosed herein, to obtain a β-nitro alcohol product of formula (I), the aldehyde or ketone substrate having the formula (III),

[chemical structure]

[0151] In an embodiment, the engineered oxynitrilase polypeptides can be used in a process of preparing a β-nitro alcohol compound, e.g., a compound of structural formula (I) as defined above.

[0152] The addition of a nitroalkane other than nitromethane to the aldehyde or ketone substrate produces two new stereocenters simultaneously. The addition of nitromethane to the aldehyde or ketone substrate produces one new stereocenter.

[0153] Thus, in an embodiment, the β-nitro alcohol product, e.g., a compound of structural formula (I) is in diastereomeric excess over the other diastereomers. In an embodiment, the (β-nitro alcohol product is present in an diastereomeric excess of at least 60%, 70%, 80%, 85%, 90%, 91%, 92%, 93%, 94%, 95%, 96%, 97%, 98%, 99%, or more.

[0154] In an embodiment, the β-nitro alcohol product, e.g., a compound of structural formula (I) is in enantiomeric excess over the other enantiomers. In an embodiment, the β-nitro alcohol product is present in an enantiomeric excess of at least 60%, 70%, 80%, 85%, 90%, 91%, 92%, 93%, 94%, 95%, 96%, 97%, 98%, 99%, or more.

[0155] In an embodiment, the oxynitrilase polypeptides have at least 80%, 85%, 86%, 87%, 88%, 89%, 90%, 91%, 92%, 93%, 94%, 95%, 96%, 97%, 98%, 99% or more of sequence identity with SEQ ID NO: 2, and are capable of coupling the aldehyde or ketone substrate, e.g., of formula (III) and the nitroalkane substrate, e.g., of formula (II), e.g., nitromethane, to form a β-nitro alcohol product, e.g., of formula (I) with a higher conversion and/or higher stereoselectivity than SEQ ID NO: 606.

[0156] As disclosed herein, the oxynitrilase polypeptides useful in the process of the present disclosure may be characterized according to the ability to condense 1,1,1-trifluoropropan-2-one and nitromethane to form (S)-1,1,1-trifluoro-2-methyl-3-nitropropan-2-ol (IA).

[0157] Thus, in any of the embodiments of the process disclosed herein, the process may be carried out, wherein the oxynitrilase polypeptides are capable of coupling 1,1,1-trifluoropropan-2-one and nitromethane to form (S)-1,1,1-trifluoro-2-methyl-3-nitropropan-2-ol (IA) with a higher conversion and/or higher stereoselectivity than SEQ ID NO: 606, and have at least 80%, 85%, 86%, 87%, 88%, 89%, 90%, 91%, 92%, 93%, 94%, 95%, 96%, 97%, 98%, 99% or more of sequence identity with SEQ ID NO: 2.

[0158] In an embodiment, the resulting β-nitro alcohol has the structure shown in formula (I-i):

[chemical structure]

[0159] wherein:
[0160] R¹ and R² are each independently selected from H, alkyl, e.g., C₁-C₂₀alkyl, alkenyl, e.g., C₂-C₂₀alkenyl, alkynyl, e.g., C₂-C₂₀alkynyl, cycloalkyl, e.g., C₃-C₁₀cycloalkyl, aryl, e.g., C₆-C₁₄aryl, arylalkyl, e.g., C₇-C₂₀arylalkyl, heterocycloalkyl, e.g., 3-14 membered heterocycloalkyl, and heteroaryl, e.g., 5-20 membered heteroaryl,
[0161] wherein the alkyl, alkenyl, and alkynyl are each optionally substituted by one or more R^{a} e.g., one to six R^{a},
[0162] wherein the cycloalkyl, aryl, arylalkyl, heterocycloalkyl, and heteroaryl are each optionally substituted by one or more R^{b}, e.g., one to six R^{b};
[0163] each R^{a} is at each occurrence independently selected from cycloalkyl, e.g., C₃-C₁₀cycloalkyl, aryl, e.g., C₆-C₁₄aryl, arylalkyl, e.g., C₇-C₂₀arylalkyl, heterocycloalkyl, e.g., 3-14 membered heterocycloalkyl, and heteroaryl, e.g., 5-20 membered heteroaryl, halogen, e.g., F, haloalkyl, e.g., C₁-C₂₀haloalkyl, e.g., —CF₃, —CN, —OR^{c}, —NR^{c}R^{c}, —(CH₂)ₙCOOR^{c}, —(CH₂)ₙ—C(═O)R^{c}, —(CH₂)ₙ—C(═O)NR^{c}R^{c};
[0164] each R^{b} is at each occurrence independently selected from halogen, e.g., F, haloalkyl, e.g., C₁-C₂₀haloalkyl, e.g., —CF₃, —CN, —NO₂, —OR^{c}, —NR^{c}R^{c}, —(CH₂)ₙCOOR^{c}, —(CH₂)ₙ—C(═O)R^{c}, —(CH₂)ₙ—C(═O)NR^{c}R^{c}, C₁-C₂₀alkyl, C₂-C₂₀alkenyl, or C₂-C₂₀alkynyl;
[0165] each R^{c} is at each occurrence independently selected from H, C₁-C₂₀alkyl, C₂-C₂₀alkenyl, and C₂-C₂₀alkynyl, each optionally substituted by one or more R^{b}, e.g., one to six R^{b}; and
[0166] n is 0, 1, 2, 3, 4, 5 or 6, e.g., 0, 1, 2 or 3;
[0167] the process comprising the step of contacting nitromethane and an aldehyde or ketone substrate with the oxynitrilase polypeptide according to the disclosure, to obtain a j-nitro alcohol product of formula (I-i), the aldehyde or ketone substrate having the formula (III),

[chemical structure]

[0168] In any of the embodiments of the process disclosed herein, R¹ and R² are each independently selected from H, C₁-C₂₀alkyl, C₂-C₂₀alkenyl, C₂-C₂₀alkynyl, C₃-C₁₀cycloalkyl, C₆-C₁₄aryl, C₇-C₂₀arylalkyl, 3-14 membered heterocycloalkyl, and 5-20 membered heteroaryl,
[0169] wherein the C₁-C₂₀alkyl, C₂-C₂₀alkenyl, and C₂-C₂₀alkynyl are each optionally substituted by one to six R^{a},
[0170] wherein the C₃-C₁₀cycloalkyl, C₆-C₁₄aryl, C₇-C₂₀arylalkyl, 3-14 membered heterocycloalkyl, and 5-20 membered heteroaryl are each optionally substituted by one to six R^{b};
[0171] each R^{a} is at each occurrence independently selected from C₃-C₁₀cycloalkyl, C₆-C₁₄aryl, 3-14 membered heterocycloalkyl, 5-20 membered heteroaryl, halogen, e.g., F, haloalkyl, e.g., C₁-C₂₀haloalkyl, e.g., —CF₃, —CN, —OR, —NR^{c}R^{c}, —(CH₂)ₙCOOR^{c}, —(CH₂)ₙ—C(═O)R^{c}, —(CH₂)ₙ—C(═O)NR^{c}R^{c};
[0172] each R^{b} is at each occurrence independently selected from halogen, e.g., F, haloalkyl, e.g., C₁-C₂₀haloalkyl, e.g., —CF₃, —CN, —NO₂, —OR^{c}, —NR^{c}R^{c}, —(CH₂)ₙCOOR^{c}, —(CH₂)ₙ—C(═O)R^{c}, —(CH₂)ₙ—C(═O)NR^{c}R^{c}, C₁-C₂₀alkyl, C₂-C₂₀alkenyl, or C₂-C₂₀alkynyl;
[0173] each R^{c} is at each occurrence independently selected from H, C₁-C₂₀alkyl, C₂-C₂₀alkenyl, and C₂-C₂₀alkynyl; and
[0174] n is 0, 1, 2, 3, 4, 5 or 6, e.g., 0, 1, 2 or 3.

[0175] In any of the embodiments of the process disclosed herein, R¹ and R² are each independently selected from H, C₁-C₂₀alkyl, C₂-C₂₀alkenyl, C₂-C₂₀alkynyl, C₃-C₁₀cycloalkyl, C₆-C₁₄aryl, C₇-C₂₀arylalkyl, 3-14 membered heterocycloalkyl, and 5-20 membered heteroaryl,
[0176] wherein the C₁-C₂₀alkyl, C₂-C₂₀alkenyl, and C₂-C₂₀alkynyl are each optionally substituted by one to six R^{a},
[0177] wherein the C₃-C₁₀cycloalkyl, C₆-C₁₄aryl, C₇-C₂₀arylalkyl, 3-14 membered heterocycloalkyl, and 5-20 membered heteroaryl are each optionally substituted by one to six R^{b}.
[0178] each R^{a} is at each occurrence independently selected from C₃-C₁₀cycloalkyl, C₆-C₁₄aryl, 3-14 membered heterocyclyl, 5-20 membered heteroaryl, halogen, e.g., F, haloalkyl, e.g., C₁-C₂₀haloalkyl, e.g., —CF₃, —CN, —OR^{c}, and —NR^{c}R^{c};
[0179] each R^{b} is at each occurrence independently selected from halogen, e.g., F, haloalkyl, e.g., C₁-C₂₀haloalkyl, e.g., —CF₃, —CN, —NO₂, —OR^{c}, —NR^{c}R^{c}, C₁-C₂₀alkyl, C₂-C₂₀alkenyl, and C₂-C₂₀alkynyl;
[0180] each R^{c} is at each occurrence independently selected from H, C₁-C₂₀alkyl, C₂-C₂₀alkenyl, and C₂-C₂₀alkynyl.

[0181] In any of the embodiments of the process disclosed herein, R¹ and R² are each independently selected from H, C₁-C₂₀alkyl, C₃-C₁₀cycloalkyl, C₆-C₁₄aryl, C₇-C₂₀arylalkyl, 3-14 membered heterocyclyl, and 5-20 membered heteroaryl,
[0182] wherein the C₁-C₂₀alkyl is optionally substituted by one to six R^{a},
[0183] wherein the C₃-C₁₀cycloalkyl, C₆-C₁₄aryl, C₇-C₂₀arylalkyl, 3-14 membered heterocyclyl, and 5-20 membered heteroaryl are each optionally substituted by one to six R^{b},
[0184] each R^{a} is at each occurrence independently selected from halogen, e.g., F, C₁-C₂₀haloalkyl, e.g., —CF₃, —CN, —OR^{c}, and —NR^{c}R^{c};
[0185] each R^{b} is at each occurrence independently selected from halogen, e.g., F, haloalkyl, e.g., C₁-C₂₀haloalkyl, e.g., —CF₃, —CN, —NO₂, —OR^{c}, and —NR^{c}R^{c};
[0186] wherein each R^{c} is at each occurrence independently selected from H, and C₁-C₂₀alkyl.

[0187] In any of the embodiments of the process disclosed herein, R¹ is selected from hydrogen, and C₁-C₂₀alkyl, wherein the C₁-C₂₀alkyl is optionally substituted by one to six R^{a}, and R² is C₁-C₂₀alkyl, wherein the C₁-C₂₀alkyl is optionally substituted by one to six R^{a},
[0188] wherein each R^{a} is at each occurrence independently selected from halogen, e.g., F, and C₁-C₂₀haloalkyl, e.g., C₁-C₂₀fluoroalkyl, e.g., —CF₃.

[0189] In any of the embodiments of the process disclosed herein, at least one of R¹ and R² is C₁-C₂₀fluoroalkyl, e.g., C₁-C₆fluoroalkyl.

[0190] In any of the embodiments of the process disclosed herein, R¹ is selected from hydrogen, and C₁-C₆alkyl, wherein the C₁-C₆alkyl is optionally substituted by one to six F, and R² is C₁-C₆alkyl or phenyl.

[0191] In any of the embodiments of the process disclosed herein, R¹ is selected from hydrogen, and trifluoromethyl, and R² is methyl or phenyl.

[0192] In any of the embodiments of the process disclosed herein, R³ and R⁴ are each independently selected from H and C₁-C₂₀alkyl, wherein the C₁-C₂₀alkyl is optionally substituted by one to six R^{a},
[0193] wherein each R^{a} is at each occurrence independently selected from C₃-C₁₀cycloalkyl, C₆-C₁₄aryl, 3-14 membered heterocyclyl, 5-20 membered heteroaryl, halogen, e.g., F, haloalkyl, e.g., C₁-C₂₀haloalkyl, e.g., —CF₃, —OR^{c}, and —NR^{c}R^{c};
[0194] wherein each R^{c} is at each occurrence independently selected from H, C₁-C₂₀alkyl, C₂-C₂₀alkenyl, and C₂-C₂₀alkynyl.

[0195] In any of the embodiments of the process disclosed herein, R³ and R⁴ are each independently selected from H and C₁-C₂₀alkyl, wherein the C₁-C₂₀alkyl is optionally substituted by one to six R^{a},
[0196] wherein each R^{a} is at each occurrence independently selected from halogen, e.g., F, C₁-C₂₀haloalkyl, e.g., —CF₃, —OR^{c}, and —NR^{c}R^{c};
[0197] wherein each R^{c} is at each occurrence independently selected from H, C₁-C₂₀alkyl, C₂-C₂₀alkenyl, and C₂-C₂₀alkynyl.

[0198] In any of the embodiments of the process disclosed herein, R³ and R⁴ are each independently selected from H and C₁-C₂₀alkyl, wherein the C₁-C₂₀alkyl is optionally substituted by one to six R^{a},
[0199] wherein each R^{a} is at each occurrence independently selected from halogen, e.g., F, C₁-C₂₀haloalkyl, e.g., —CF₃, —OR^{c}, and —NR^{c}R^{c};
[0200] wherein each R^{c} is at each occurrence independently selected from H, and C₁-C₂₀alkyl.

[0201] In any of the embodiments of the process disclosed herein, the substrate is a ketone.

[0202] In any of the embodiments of the process disclosed herein, the nitroalkane substrate is nitromethane or nitroethane.

[0203] In any of the embodiments of the process disclosed herein, the ketone substrate is

[chemical structure]

[0204] The present disclosure also provides a process for the asymmetric synthesis of (S)-1,1,1-trifluoro-2-methyl-3-nitropropan-2-ol (IA):

[chemical structure]

the process comprising the step of contacting nitromethane and 1,1,1-trifluoropropan-2-one with the oxynitrilase polypeptide according to the present disclosure, to obtain (S)-1,1,1-trifluoro-2-methyl-3-nitropropan-2-ol of formula (IA).

[0205] As disclosed herein and exemplified in the examples, the present disclosure contemplates a range of suitable reaction conditions that may be used in the process herein, including but not limited to pH, temperature, buffers, solvent systems, substrate loadings, mixtures of product stereoisomers, e.g., enantiomers, polypeptide loading, cofactor loading, pressure, and reaction time. Additional suitable reaction conditions for performing a method of enzymatically converting substrate compounds to a product compound using engineered oxynitrilase polypeptides described herein can be readily optimized by routine experimentation, which including but not limited to that the engineered oxynitrilase polypeptide is contacted with substrate compounds under experimental reaction conditions of varying concentration, pH, temperature, solvent conditions, and the product compound is detected, for example, using the methods described in the Examples provided herein.

[0206] As described above, engineered polypeptides having oxynitrilase activity for use in the process of the present disclosure generally comprises amino acid sequences that have at least 80%, 85%, 86%, 87%, 88%, 89%, 90%, 91%, 92%, 93%, 94%, 95%, 96%, 97%, 98% or 99% sequence identity to the reference amino acid sequence selected from any one of the even numbered sequences of SEQ ID NO: 4 to 604, and 608 to 640.

[0207] The substrate compounds in the reaction mixture can be varied, taking into consideration of, for example, the amount of the desired product compound, the effect of the substrate concentration on the enzyme activity, the stability of the enzyme under the reaction conditions, and the percent conversion of substrate to product. In any of the embodiments of the process disclosed herein, the suitable reaction conditions include at least about 0.5 to about 200 g/L, about 1 to about 200 g/L, about 5 to about 150 g/L, about 10 to about 150 g/L, or about 50 to about 150 g/L of loading of aldehyde or ketone substrate, e.g., formula (III). In an embodiment, suitable reaction conditions include at least about 0.5 g/L, at least about 1 g/L, at least about 5 g/L, at least about 10 g/L, at least about 15 g/L, at least about 20 g/L, at least about 30 g/L, at least about 50 g/L, at least about 75 g/L, at least about 100 g/L or even more of loading of aldehyde or ketone substrate, e.g., formula (III). The values for the substrate loading provided herein are based on the molecular weight of the aldehyde or ketone substrate, e.g., formula (III), however it is also contemplated that the equivalent molar amounts of various hydrates and salts of the aldehyde or ketone substrate, e.g., formula (III), may also be used in the process.

[0208] In any of the embodiments of the process disclosed herein, the engineered oxynitrilase polypeptides use aldehyde or ketone substrate and a nitroalkane compound to form a β-nitro alcohol product compound. In an embodiment, suitable reaction conditions include nitroalkane present in a loading of at least about 1 times of the molar loading of the aldehyde or ketone substrate, e.g., formula (III). In an embodiment, the nitroalkane is present at a loading of 2, 3, 4, 5, 6, 7, 8, 9 or 10 times of the molar loading of the aldehyde or ketone substrate, e.g., formula (III).

[0209] In any of the embodiments of the process disclosed herein, suitable reaction conditions include nitroalkane present in a loading of 0.5 to about 200 g/L, about 1 to about 200 g/L, about to about 150 g/L, about 10 to about 150 g/L, or about 50 to about 150 g/L of loading of nitroalkane substrate. In an embodiment, suitable reaction conditions include at least about 0.5 g/L, at least about 1 g/L, at least about 5 g/L, at least about 10 g/L, at least about 15 g/L, at least about 20 g/L, at least about 30 g/L, at least about 50 g/L, at least about 75 g/L, at least about 100 g/L or even more of loading of nitroalkane substrate.

[0210] In any of the embodiments of the process disclosed herein, the reaction conditions may include a suitable pH. As noted above, the desired pH or desired pH range can be maintained by using an acid or base, a suitable buffer, or a combination of buffer and added acid or base. The pH of the reaction mixture can be controlled before and/or during the reaction. In some embodiments, suitable reaction conditions include a solution pH of about 4 to about 8, a pH of about 5 to about 7, a pH of about 6 to about 7. In some embodiments, the reaction conditions include a solution pH of about 4, 4.5, 5, 5.5, 6, 6.5, 7, 7.5 or 8.

[0211] In any of the embodiments of the process disclosed herein, suitable temperatures can be used for the reaction conditions, taking into consideration of, for example, the increase in reaction rate at higher temperatures, the activity of the enzyme for sufficient duration of the reaction. Accordingly, in some embodiments, suitable reaction conditions include a temperature of about 10° C. to about 60° C., about 25° C. to about 50° C., about 25° C. to about 40° C., about 25° C. to about 30° C., or about 10° C. to about 30° C. In some embodiments, suitable reaction temperatures include a temperature of about 10° C., 15° C., 20° C., 25° C., 30° C., 35° C., 40° C., 45° C., 50° C., 55° C., or 60° C. In some embodiments, the temperature during the enzymatic reaction can be maintained at a certain temperature throughout the reaction. In some embodiments, the temperature during the enzymatic reaction may be adjusted over a temperature profile during the course of the reaction.

[0212] The processes of using the engineered oxynitrilases are generally carried out in a solvent. However, the processes may also be carried out in the absence of a solvent.

[0213] Suitable solvents include water, aqueous buffer solutions, organic solvents, and/or co-solvent systems, which generally include aqueous solvents and organic solvents. The organic solvent may be any organic solvent. Preferably, it shall not disturb or inhibit the enzymatic reaction. In certain embodiments, the organic solvent is water-miscible or partly water-miscible. The organic solvent especially is an aprotic organic solvent.

[0214] The aqueous solutions (water or aqueous co-solvent systems) can be pH-buffered or unbuffered. In some embodiments, the processes of using an engineered oxynitrilase polypeptide are generally carried out in solvent system comprising an organic solvent. In some embodiments, the processes of using an engineered oxynitrilase polypeptide are generally carried out in an aqueous co-solvent system comprising an organic solvent.

[0215] In any of the embodiments of the process disclosed herein, the organic solvent is selected from methanol, ethanol, propanol, isopropanol, dimethyl sulfoxide (DMSO), dimethylformamide (DMF), isopropyl acetate, ethyl acetate, butyl acetate, 1-octanol, hexane, heptane, octane, methyl tert-butyl ether (MTBE), toluene, benzene, glycerol, polyethylene glycol, and an ionic liquid, e.g., 1-ethyl 4-methylimidazolium tetrafluoroborate, 1-butyl-3-methylimidazolium tetrafluoroborate, 1-butyl-3-methylimidazolium hexafluorophosphate.

[0216] The organic solvent component of the aqueous co-solvent system may be miscible with the aqueous component, providing a single liquid phase, or may be partially miscible or immiscible with the aqueous component, providing two liquid phases. Exemplary aqueous co-solvent system comprises water and one or more organic solvents as defined herein. In general, the organic solvent component of the aqueous co-solvent system is selected such that it does not completely inactivate the oxynitrilase. Suitable co-solvent systems can be readily identified by measuring the enzymatic activity of a particular engineered oxynitrilase with a defined substrate of interest in the candidate solvent system, utilizing enzymatic activity assays, such as those described herein. In any of the embodiments of the process disclosed herein, suitable reaction conditions include an aqueous co-solvent system comprising isopropyl acetate at a concentration of about 1% to about 60% (v/v), about 1% to about 50% (v/v), about 1% to about 40% (v/v), about 2% to about 40% (v/v), about 5% to about 40% (v/v), from about 10% to about 40% (v/v), from about 10% to about 30% (v/v), or about 10% to about 20% (v/v). In some embodiments of the process, suitable reaction conditions include an aqueous co-solvent system comprising isopropyl acetate at a concentration of at least about 1%, 5%, 10%, 15%, 20%, 25%, 30%, 35%, 40%, 45%, 50%, 55%, or 60% (v/v).

[0217] Suitable reaction conditions can include a combination of reaction parameters that provide for the biocatalytic conversion of the substrate compounds to its corresponding product compound. Accordingly, in some embodiments of the process, the combination of reaction parameters comprises: (a) substrate loading, e.g., 1,1,1-trifluoropropan-2-one loading of about 5 g/L to about 150 g/L; (b) nitroalkane loading, e.g., nitromethane loading is about 2 times the molar amount of the substrate, e.g., 1,1,1-trifluoropropan-2-one; (c) engineered polypeptide concentration of about at least 3 g/L; (d) aqueous isopropyl acetate concentration of about 1% (v/v) to about 60% (v/v); (e) pH of about 4.0 to 8.0; and (f) temperature of about 10° C. to 30° C.

[0218] Exemplary reaction conditions include the assay conditions provided in the Examples section.

[0219] In carrying out the reaction described herein, the engineered oxynitrilase polypeptide biocatalyst may be added to the reaction mixture in different formulation forms, as frozen or lyophilized whole cells (FWC or LWC) transformed with the gene encoding the engineered oxynitrilase polypeptide and/or as cell lysate or lyophilized cell lysate of such cells, so called shake flask powder (SFP), where the cell debris was removed and/or further purified as fermentation powder (FP). Whole cells transformed with the gene encoding the engineered oxynitrilase or cell extracts, lysates thereof, and isolated enzymes can be used in a wide variety of different forms, including solids (e.g., lyophilized, spray dried, or the like) or semisolid (e.g., a crude paste). The cell extract or cell lysate may be partially purified by precipitation (e.g., ammonium sulfate, polyethyleneimine, heat treatment or the like), followed by desalting procedures (e.g., ultrafiltration, dialysis, and the like) prior to lyophilization. Any of the enzyme preparations can be stabilized by crosslinking using known crosslinking agents, such as glutaraldehyde, or immobilization to a solid phase material (such as a resin).

[0220] In any of the embodiments of the process disclosed herein, the reaction is performed under suitable reaction conditions described herein, wherein the engineered oxynitrilase polypeptide is immobilized to a solid support, such as a membrane, resin, solid carrier, or other solid phase material. A solid support can be composed of organic polymers such as polystyrene, polyethylene, polypropylene, polyfluoroethylene, polyethyleneoxy, polymethacrylate, and polyacrylamide, as well as co-polymers and grafts thereof. A solid support can also be inorganic, such as glass, silica, controlled pore glass (CPG), reverse phase silica or metal, such as gold or platinum. The configuration of a solid support can be in the form of beads, spheres, particles, granules, a gel, a membrane or a surface. Surfaces can be planar, substantially planar, or non-planar. Solid supports can be porous or non-porous, and can have swelling or non-swelling characteristics. A solid support can be configured in the form of a well, depression, or other container, vessel, feature, or location. Solid supports useful for immobilizing the engineered oxynitrilase enzyme for carrying out the reaction include but are not limited to beads or resins such as polymethacrylate, e.g., polymethacrylates with epoxy functional groups, polymethacrylates with amino epoxy functional groups, polymethacrylates, styrene/DVB copolymer or polymethacrylates with octadecyl functional groups.

[0221] In a particular embodiment, the solid support is a bead or resin comprising polymethacrylate.

[0222] Exemplary solid supports include, but are not limited to, chitosan beads, Eupergit C, IB-150, IB-350, IB-C435, IB-A369, IB-A161, IB-A171, IBS500, IB-S861, SEPABEADS (Mitsubishi), e.g., Sepabeads EC-EP, Sepabeads EC-HFA, Sepabeads EC-HG, Sepabeads EC-BU, Sepabeads EC-OD, Sepabeads EC-CM, Sepabeads EC-IDA, Sepabeads EC-EA, Sepabeads EC-HA, Sepabeads EC-QA, Sepabeads EXE, Sepabeads EXA, Dilbeads-TA, Amberzyme Oxirane, Amberlite XAD-7HP, Amberlite FPA98Cl, Amberlite IRA958Cl, Amberlite IRA67, Amberlite FPA90Cl, Amberlite FPA40Cl, Amberlite XAD18, Accurel EP100, ECR8206F/5730, ECR8206/5803, ECR8206M/5749, ReliZyme EP403, ReliZymeEP113, Lewatit VP OC 1600, Diaion WA20, Diaion WA21J, Diaion WA30, Dowex 66, Diaion HPA-25L, Lewatit VP OC 1064 MD PH, Lewatit VP OC 1163, Lifetech ECR8304F. Lifetech ECR8309F, Lifetech ECR8315F, Lifetech ECR8204F, Lifetech ECR8285, Lifetech ECR1090M, Lifetech ECR1030M, Lifetech ECR8806M, Chromalite (MAM2/F) D6591, Chromalite MIDA/M, Chromalite MIDA/M/Fe, Chromalite MIDA/M/Co, Chromalite MIDA/M/Ni, Chromalite MIDA/M/Cu and Chromalite MIDA/M/Zn.

[0223] In any of the embodiments of the process disclosed herein, wherein an engineered polypeptide is expressed in the form of a secreted polypeptide, a culture medium containing the secreted polypeptide can be used in the process herein.

[0224] In any of the embodiments of the process disclosed herein, the solid reactants (e.g., enzymes, salts, etc.) can be provided to the reaction in a variety of different forms, including powders (e.g., lyophilized, spray dried, etc.), solutions, emulsions, suspensions, and the like. The reactants can be readily lyophilized or spray-dried using methods and instrumentation known to one skilled in the art. For example, the protein solution can be frozen at −80° C. in small aliquots, and then added to the pre-chilled lyophilization chamber, followed by the application of a vacuum.

[0225] In any of the embodiments of the process disclosed herein, the order of addition of reactants is not critical. The reactants may be added together to the solvent at the same time (e.g., monophasic solvent, a biphasic aqueous co-solvent system, etc.), or alternatively, some reactants may be added separately, and some may be added together at different time points. For example, the oxynitrilase and substrates may be added first to the solvent. For improved mixing efficiency when using aqueous co-solvent systems, oxynitrilase may be added and mixed into the aqueous phase first. The organic phase, e.g., isopropyl acetate, can then be added and mixed in, followed by addition of the substrates. Alternatively, the substrates can be premixed in the organic phase prior to addition to the aqueous phase.

[0226] The methods of performing an enzymatic reaction may comprise the further step of isolating the product of the enzymatic reaction. In particular, this step is performed after completion of the enzymatic reaction. The product is in particular separated from one or more, in particular essentially all of the other components of the reaction mixture. For example, the product is separated from the remaining substrate, side products, the enzyme, and/or organic solvents. Isolation of the product may be achieved by means and techniques known in the art, including for example evaporation of solvents, aggregation or crystallization and filtration, phase separation, chromatographic separation and others.

[0227] An engineered oxynitrilase polypeptide that can be used in any of the embodiments of the process disclosed herein can comprise one or more sequences selected from the amino acid sequences corresponding to SEQ ID NOs: 4, 6, 8, 10, 12, 14, 16, 18, 20, 22, 24, 26, 28, 30, 32, 34, 36, 38, 40, 42, 44, 46, 48, 50, 52, 54, 56, 58, 60, 62, 64, 66, 68, 70, 72, 74, 76, 78, 80, 82, 84, 86, 88, 90, 92, 94, 96, 98, 100, 102, 104, 106, 108, 110, 112, 114, 116, 118, 120, 122, 124, 126, 128, 130, 132, 134, 136, 138, 140, 142, 144, 146, 148, 150, 152, 154, 156, 158, 160, 162, 164, 166, 168, 170, 172, 174, 176, 178, 180, 182, 184, 186, 188, 190, 192, 194, 196, 198, 200, 202, 204, 206, 208, 210, 212, 214, 216, 218, 220, 222, 224, 226, 228, 230, 232, 234, 236, 238, 240, 242, 244, 246, 248, 250, 252, 254, 256, 258, 260, 262, 264, 266, 268, 270, 272, 274, 276, 278, 280, 282, 284, 286, 288, 290, 292, 294, 296, 298, 300, 302, 304, 306, 308, 310, 312, 314, 316, 318, 320, 322, 324, 326, 328, 330, 332, 334, 336, 338, 340, 342, 344, 346, 348, 350, 352, 354, 356, 358, 360, 362, 364, 366, 368, 370, 372, 374, 376, 378, 380, 382, 384, 386, 388, 390, 392, 394, 396, 398, 400, 402, 404, 406, 408, 410, 412, 414, 416, 418, 420, 422, 424, 426, 428, 430, 432, 434, 436, 438, 440, 442, 444, 446, 448, 450, 452, 454, 456, 458, 460, 462, 464, 466, 468, 470, 472, 474, 476, 478, 480, 482, 484, 486, 488, 490, 492, 494, 496, 498, 500, 502, 504, 506, 508, 510, 512, 514, 516, 518, 520, 522, 524, 526, 528, 530, 532, 534, 536, 538, 540, 542, 544, 546, 548, 550, 552, 554, 556, 558, 560, 562, 564, 566, 568, 570, 572, 574, 576, 578, 580, 582, 584, 586, 588, 590, 592, 594, 596, 598, 600, 602, 604, 608, 610, 612, 614, 616, 618, 620, 622, 624, 626, 628, 630, 632, 634, 636, 638, or 640.

[0228] In any of the embodiments of the processes disclosed herein, the β-nitro alcohol product, e.g., formula (IA), is obtained with at least 55% ee, e.g., at least 65% ee, e.g., at least 75%, e.g., at least 80%, e.g., at least 90% ee, e.g., at least 95% ee, e.g., at least 99%, enantiomeric excess (e.e.).

[0229] In any of the embodiments of the process disclosed herein, the β-nitro alcohol compound, e.g., formula (IA), is obtained with a conversion rate of at least 10%, e.g., at least 20%, e.g., at least 30% e.g., at least 40%, e.g., at least 50%, more preferably with at least 75%, at least 85%, at least 90%, e.g., 95%.

[0230] The present disclosure also provides a process for synthesizing (S)-3-amino-1,1,1-trifluoro-2-methylpropan-2-ol of formula (IB):

[chemical structure]

the process comprising the step of contacting (IA) with hydrogen under suitable hydrogenation conditions, to obtain (S)-3-amino-1,1,1-trifluoro-2-methylpropan-2-ol (IB), wherein (IA) is synthesized by the process according to according to the present disclosure.

[0231] The source of hydrogen can be selected from gaseous hydrogen (H₂), hydrogen donors (transfer hydrogenation, e.g., formic acid or salts thereof), hydride reagent (LiAlH₄) or the like.

[0232] Suitable hydrogenation reaction conditions include the presence of hydrogen gas, a transition metal catalyst, and a suitable solvent. In an embodiment, the transition metal catalyst is selected from sponge metal, e.g., sponge nickel, sponge cobalt, Pd/C, Pt/C, PtO₂, Rh/Al₂O₃ and Pd/BaSO₄. In particular, the catalyst is sponge nickel. In an embodiment, the transition metal catalyst is present at a loading of at least 2 wt. %, e.g., at least 5 wt. %, at least 10 wt. %. The sponge metal or Raney metal catalysts which may be employed in the reaction contain from 0.1 to 10%, for example, about 0.5 to 3%, by weight molybdenum based upon the weight of the catalyst, as a promoter. Sponge nickel promoted with molybdenum is the preferred catalyst, although sponge cobalt or Raney cobalt is well suited. These catalysts may be employed in the reaction medium at a loading of at least 2 wt. %, e.g., at least 5 wt. %, at least 10 wt. %. In an embodiment, the transition metal catalyst is metal promoted sponge nickel, e.g., molybdenum promoted sponge nickel. In an embodiment, the transition metal catalyst is unpromoted sponge nickel. In an embodiment, the solvent is selected from water, ethanol, methanol, n-propanol, isopropanol, ethyl acetate, isopopyl acetate, butyl acetate, tert-butyl methyl ether, and tetrahydrofuran. In an embodiment, the reaction is carried out at a temperature of about 20-60° C., e.g., 20° C., 25° C., 30° C., 35° C., 40° C., 45° C., 50° C., 55° C., 60° C. In an embodiment, the reaction is carried out at a pressure of about 0.1-40 bar. In an embodiment, the compound of formula (IA) is present at a concentration of at least 2 wt. %, e.g., 2, 4, 8, 10 wt. %. In an embodiment, the hydrogenation reaction is carried out carried out in batch or flow.

[0233] In a further embodiment, the process described above for producing (IB) further comprises the step of converting the compound of formula (IB) to an acid salt. In a further embodiment, the process comprises the additional step of crystallizing the acid salt. Preferably, the acid salt is a HCl salt. The crystallization step increases the enantiomeric purity of compound (IB). Advantageously, the compound (IB) having an ee of about 92% before isolation increased to around 98% after isolation of the crystallized compound (IB) HCl salt.

[0234] The present disclosure also provides a process for synthesizing (S)-3-amino-6-methoxy-N-(3,3,3-trifluoro-2-hydroxy-2-methylpropyl)-5-(trifluoromethyl)picolinamide of formula (IC)

[chemical structure]

the process comprising the step of contacting nitromethane and 1,1,1-trifluoropropan-2-one with the oxynitrilase polypeptide according to the present disclosure, to obtain (S)-1,1,1-trifluoro-2-methyl-3-nitropropan-2-ol of formula (IA).

[0235] In a particular embodiment, the process further comprises the step of contacting the compound of (IA) with hydrogen under suitable hydrogenation conditions, to obtain (S)-3-amino-1,1,1-trifluoro-2-methylpropan-2-ol (IB). In a further embodiment, the process further comprises the step of converting the compound of formula (IB) to an acid salt. Preferably, the acid salt is a HCl salt (compound (IB). HCl).

In a further embodiment, the process comprises the additional step of crystallizing the acid salt.

[0236] The further steps required to synthesize the compound of formula (IC) from (IB) or (IB). HCl may be employed according to the disclosure of EP3555048 B1, e.g., according to Scheme and [0028] and the Examples therein.

[0237] Alternatively, the process may further comprise the step of coupling the compound of formula (IB). HCl or crystallized (IB). HCl with a compound of formula (E6) in the presence of a coupling reagent under suitable reactions conditions,

[chemical structure]

to produce a compound of formula (IC).

[0238] Suitable reaction conditions can be those generally employed in the amidation of carboxylic acids, as known in the art. These may include a suitable coupling reagent such as tetramethyl orthosilicate (TMOS), N-(3-dimethylaminopropyl)-N′-ethylcarbodiimide hydrochloride (EDC), dicyclohexylcarbodiimide (DCC), 1,1′-carbonyldiimidazole (CDI), e.g., in the presence of a suitable base, such as Et₃N, DIEA, DMAP or pyridine, in a suitable solvent, such as THF, DCM or toluene, at a suitable temperature, such as between 0° C. and 120° C. In a particular embodiment, the coupling reagent is tetramethyl orthosilicate. In a particular embodiment, suitable reaction conditions include Et₃N, toluene and heating the reaction to about 110° C.

[0239] The full procedure for the synthesis of compound (IC) is described in Scheme 2 vide infra.

[chemical structure]

[0240] In a further embodiment, there is provided a process for the preparation of a compound of formula (IC)

[chemical structure]

in free form or in pharmaceutically acceptable salt form according to Scheme 2. In a further embodiment of Scheme 2, compound (IB).HCl is synthesised according to the present disclosure.

[0241] Different features and embodiments of the present disclosure are exemplified in the following representative examples, which are intended to be illustrative and not restrictive.

### EXAMPLES

[0242] The following Examples, including experiments and results achieved, are provided for illustrative purposes only and are not to be construed as limiting the present invention.

[0243] In the Examples below, the following abbreviations apply: ppm (parts per million); M (molar); mM (millimolar), uM and μM (micromolar); nM (nanomolar); mol (moles); gm and g (gram); mg (milligrams); ug and μg (micrograms); L and 1 (liter); ml and mL (milliliter); cm (centimeters); mm (millimeters); um and μm (micrometers); sec. (seconds); min(s) (minute(s)); h(s) and hr(s) (hour(s)); U (units); MW (molecular weight); rpm (rotations per minute); psi and PSI (pounds per square inch); ° C. (degrees Centigrade); RT and rt (room temperature); OD600 (Optical density at 600 nm), CAM and cam (chloramphenicol); IPAc (isopropylacetate), DMSO (dimethylsulfoxide); FP (Fermentation powder); FWC (Frozen whole cells), LWC (Lyophilized whole cells), PMBS (polymyxin B sulfate); IPTG (isopropyl β-D-1-thiogalactopyranoside); LB (Lysogeny broth); NM (Nitromethane), MeOH (Methanol), MTBE (Methyl-tert-butylether), TB (Terrific Broth; 12 g/L bacto-tryptone, 24 g/L yeast extract, 4 mL/L glycerol, 65 mM potassium phosphate, pH 7.0, 1 mM MgSO4); PLP (pyridoxal 5′-phosphate), TEoA (triethanolamine buffer), HEPES (HEPES zwitterionic buffer; 4-(2-hydroxyethyl)-piperazineethanesulfonic acid); SFP (shake flask powder); CDS (coding sequence); DNA (deoxyribonucleic acid); RNA (ribonucleic acid); E. coli W3110 (commonly used laboratory E. coli strain, available from the Coli Genetic Stock Center [CGSC], New Haven, CT); HTP (high throughput); HPLC (high pressure liquid chromatography); GC (gas chromatography), MS (mass spectrometer), RF (Rapid Fire), FIOP (fold improvements over positive control); Microfluidics (Microfluidics, Corp., Westwood, MA); Sigma-Aldrich (Sigma-Aldrich, St. Louis, MO; Difco (Difco Laboratories, BD Diagnostic Systems, Detroit, MI); Agilent (Agilent Technologies, Inc., Santa Clara, CA); Corning (Corning, Inc., Palo Alto, CA); Dow Corning (Dow Corning, Corp., Midland, MI); and Gene Oracle (Gene Oracle, Inc., Mountain View, CA).

[0244] Throughout the Examples, “T100% conv” corresponds to the calculated conversion for each single sample expressed in percentage with regard to the theoretical 100% conversion value. The amount of produced nitroaldol product in each single sample is quantified by HPLC using an external standard of nitroaldol product with a known concentration. The conversion of each single sample is obtained by dividing the calculated amount of the produced nitroaldol product by the theoretical amount of nitroaldol product when 100% conversion is achieved, then the obtained value is multiplied by 100, expressing the conversion result in percentage.

### Example 1

Production of Engineered Polypeptides in pCK110900

[0245] The polynucleotide (SEQ ID NO: 1) encoding the polypeptide having Oxynitrilase activity (SEQ ID NO: 2), was cloned into the pCK110900 vector system (See e.g., US Pat. App. No. 2006/0195947A1 FIG. 3 which is hereby incorporated by reference in its entirety) and subsequently expressed in E. coli W3110fhuA under the control of the lac promoter. The expression vector also contained the P15a origin of replication and the chloramphenicol (CAM) resistance gene. This polynucleotide, and associated polypeptide, was a product of six rounds of directed evolution starting from a (S)-hydroxynitrile lyase found in Baliospermum montanum (UniProt D1MX73).

### Example 2

### Preparation of Cell Pellets

[0246] E. coli W3110fhuA cells were transformed with the pCK110900 plasmid containing the oxynitrilase-encoding genes. Transformed cells were plated out on Lysogeny broth (LB) agar plates containing 1% glucose and 30 μg/mL CAM, and grown overnight at 37° C. Subsequently single colonies were picked in a 96-well format and grown in 190 μL LB media containing 1% glucose and 30 μg/mL CAM, at 30° C., 200 rpm, and 85% humidity. Following overnight growth, 20 μL of the grown cultures were transferred into a deep well plate containing 380 μL of Terrific Broth (TB) media with 30 μg/mL CAM. The cultures were grown at 30° C., 250 rpm, with 85% humidity for approximately 2.5 hours. When the optical density (OD600) of the cultures reached 0.4-0.8, expression of the oxynitrilase gene was induced by the addition of isopropyl-β-D-thiogalactoside (IPTG) to a final concentration of 1 mM. Following induction, growth continued for 18-20 hours at 30° C., 250 rpm with 85% humidity. Cells were harvested by centrifugation at 4,000 rpm and 4° C. for 10 minutes; the supernatant was then discarded. The cell pellets were stored at −80° C. until ready for use.

### Example 3

### Lysis and Preparation of Clarified Lysate

[0247] Prior to performing the assay, the cell pellets were thawed and resuspended in 300 μL of lysis buffer (containing 1 g/L lysozyme, 0.5 g/L PMBS and 0.1 μL/mL or 0.2 U/ml of commercial DNAse (New England BioLabs, M0303L) in 0.1M Citric buffer at pH 6.0. The plates were agitated with medium-speed shaking for 2.5 hours on a microtiter plate shaker at room temperature. The plates were then centrifuged at 4,000 rpm for 10 minutes at 4° C., and the clarified supernatants were used in the HTP assay reaction for activity determination as described in the following examples.

### Example 4

### Preparation of Frozen Whole Cells (FWC), Lyophilized Whole Cells (LWC), Shake Flask Powder (SFP) and Fermentation Powder (FP)

[0248] Shake-flask procedures can be used to generate engineered oxynitrilase polypeptide shake-flask powders (SFP), which are useful for secondary screening assays and/or use in the biocatalytic processes described herein. Shake flask powder preparation of enzymes provides a more concentrated preparation of the engineered enzyme, as compared to the cell lysate used in HTP assays. To start the culture, either a single colony from a plate or a glycerol stock of E. coli containing a plasmid encoding an engineered polypeptide of interest, was inoculated into 25 mL of LB supplemented with 30 μg/mL CAM and 1% glucose in a 250 ml baffled shake flask. The culture was grown overnight (16-20 hours and OD₆₀₀>3.8) in an incubator at 37° C., with shaking at 250 rpm. A 1 μL shake flask containing 250 mL of TB media with 30 μg/mL CAM, was inoculated with 5 mL of the grown overnight culture. The 250 mL culture was incubated at 30° C., 250 rpm, for 3-3.5 hours until OD₆₀₀ reached 0.6-0.8. Expression of the oxynitrilase gene was induced by the addition of IPTG to a final concentration of 1 mM, and growth was continued for an additional 18-20 hours. Cells were harvested by transferring the culture into a centrifuge bottle, which was then centrifuged at 7,000 rpm for 5 minutes at 4° C. The supernatant was discarded, and the remaining cell pellet was either lysed or in some embodiments, stored at −80° C. as frozen whole cells (FWC) until ready to use. For lysis, the cell pellet was resuspended in 30 mL of 50 mM Citrate buffer at pH 6.0 and lysed using a LM20 MICROFLUIDIZER© processor system (Microfluidics). Cell debris was removed by centrifugation at 14,000 rpm for 30 minutes at 4° C. The clarified lysate was collected, frozen at −80° C., and then lyophilized, using standard methods known in the art. Lyophilization of frozen clarified lysate provides a dry shake-flask powder (SFP) and lyophilization of FWCs provides dry lyophilized whole cells (LWC), both comprising crude engineered oxynitrilase polypeptide. To access larger quantities of enzymes, which are necessary for upscaled reactions like in example 12, cells were fermented in a bioreactor using standard methods known in the art. Compared to SFP this fermentation powder (FP) had a higher concentration of the engineered oxynitrilase polypeptide due to a lower salt content.

### Example 5

### Analytical Method for Activity and Selectivity Evaluation

[0249] Activity improvements of the engineered oxynitrilases were analyzed either by High Pressure Liquid Chromatography (HIPLC) using the method described in Table 5.1 or RapidFire® Mass Spectrometry (RF-MS) using the method described in Table 5.2. HIPLC method with UV-detection was developed to analyze the conversion of compound (1) and (2) to compounds (IA). Only the nitromethane substrate (2) and the nitro alcohol product (IA) could be detected without any differentiation between (IA) vs. (R) enantiomer of (IA). In Examples 9, 10 and 11, RF-MS was used for rapid quantification of the product (IA). The corresponding method parameters are described in Table 5.2.

TABLE 5.1
HPLC method used for activity determination.

| Instrument | Agilent Technologies 1290 Infinity II with | | |
|---|---|---|---|
| | UV detection | | |
| Column | Kinetex ®2.6 μm EVO C18 100 Å | | |
| | (PN: 00B-4725-AN) Length 50 mm, | | |
| | internal diameter 2.1 mm or equivalent | | |
| | column, particle size: 2.6 μm. | | |
| Mobile Phase | A: 5 mM Potassium Phosphate Buffer, | | |
| | pH 6.3. | | |
| | B: Methanol | | |
| | | | Flowrate |
| | Time (min.) | Phase B (%) | (mL/min) |
| Gradient | 0 | 2 | 0.6 |
| | 0.2 | 2 | 0.6 |
| | 0.8 | 80 | 1.2 |
| | 1.0 | 80 | 0.6 |
| | 1.10 | 2 | 0.6 |
| | 1.70 | 2 | 0.6 |

| | |
|---|---|
| Run Time | 1.70 minutes |
| Compound elution | Nitromethane substrate (2): 0.27 min. |
| | Nitroaldol product (IA): 0.73 min |
| Column Temperature | 40° C. |
| Autosampler Temperature | 15° C. |
| Injection volume | 1 μL |
| Detection | UV 220 nm |

TABLE 5.2
RF-MS method used for activity determination

| | |
|---|---|
| Instrument | Agilent RapidFire 365 high throughput with a 6470 |
| | triple quadrupole mass spectrometer (MS-TQ) |
| Cartridge | RapidFire Cartridge, graphitic carbon (type D) |
| | G9206A (Agilent) |
| | Size: 4 μL |
| Mobile Phase | A: Water/Acetonitrile/Formic Acid (FA) |
| | (98.5:1.5:0.10/%) |
| | B: Water/Acetonitrile/FA (5:95:0.10/%) |
| | C: Water/Acetonitrile/FA (5:95:0.10/%) |
| MS source | Gas Temperature: 230° C. |
| parameters | Gas flow: 5 L/min |
| | Nebulizer: 40 psi |
| | Sheath Gas Temperature: 250° C. |
| | Sheath Gas Flow: 12 L/min |
| | Capillary: 5000 V (NEG) |
| | Nozzle Voltage: 1500 V (NEG) |
| MS detection | MRM mod |
| parameters | Polarity: Negative |
| | Precursor Ion: 172 |
| | Product ion one: 102 |
| | Product ion two: 69 |
| | For both: Dwell time 100 ms, Fragmentor 120 and |
| | Collision energy 20 |

[0250] The Selectivity towards either the desired (S′)-(IA) or the undesired (R)-(IA) of selected samples were analyzed by gas chromatography (GC) using the method described in Table 5.3.

TABLE 5.3
GC method used for selectivity determination.

| Instrument | Agilent 8890 GC with FID detection | | |
|---|---|---|---|
| Column | Chiraldex ® G-TA. | | |
| | Length 30 mm, internal diameter 0.250 mm or | | |
| | equivalent column, film thickness: 0.12 μm. | | |
| Detector parameters | Temperature: 250° C. | | |
| | Flow H2: 30 mL/min | | |
| | Air flow: 400 mL/min | | |
| | Makeup (N2): 25 mL/min | | |
| Injector parameters | Temperature: 250° C. | | |
| | Split ratio: 50 | | |
| Carrier gas | Helium (constant 5 ml/min) | | |
| | Time (min) | Temperature (° C.) | Rate (° C./min) |
| Gradient | 0 | 100 | 0 |
| | 0.5 | 100 | 2.5 |
| | 4.5 | 110 | 0 |
| | 5.0 | 110 | Next injection |

| | |
|---|---|
| Run Time | 5.00 minutes |
| Compound elution | product R-enantiomer of (IA): 3.7 min |
| | product (IA): 4.1 min |
| Injection volume | 1 μL |

[0251] In Examples 20 the LC-MS was used for the detection of the products 1,1,1-trifluoro-2-methyl-3-nitrobutan-2-ol (4) and 1,1,1-trifluoro-3-nitro-2-phenylpropan-2-ol (8). The method parameters are described in Table 5.4.

TABLE 5.4
LC-MS method used for product detection.

| Instrument | Agilent Technologies 1290 Infinity II with MS | |
|---|---|---|
| | detection (Ultivo) | |
| Column | Waters Acquity BEH C18 Length 50 mm, | |
| | internal diameter 2.1 mm or equivalent column, | |
| | particle size: 1.7 μm. | |
| Mobile Phase | A: Water/Acetonitrile (90:10 v/v) + 0.1% formic acid | |
| | B: Water/Acetonitrile (10:90 v/v) + 0.1% formic acid | |
| | Time (min.) | Phase B (%) |
| Gradient | 0 | 10 |
| | 1.75 | 95 |
| | 2.00 | 95 |
| | 2.10 | 10 |
| | 3.00 | 10 |

| | |
|---|---|
| Flow | 0.750 ml/min. |
| Run Time | 3.00 minutes |
| Column | 40° C. |
| Temperature | |
| Autosampler | 15° C. |
| Temperature | |
| Injection volume | 1 μL |
| Detection | UV 220 nm |
| MS detection | Ion source: AJS ESI |
| | Detection mode: Scan (50 ms), Negative |
| | Fragmentor: 110 V |
| | Gas temperature: 250° C. |
| | Gas flow: 11.0 L/min |
| | Nebulizer: 30 psi |
| | Sheath gas temperature: 250° C. |
| | Sheath gas flow: 11.0 l/min |
| | Capillary voltage: 4500 V |
| | Nozzle voltage: 1500 V |

[0252] In Examples 20 the GC-MS/FD was used for the detection of the product 1-nitro-2-phenylpropan-2-ol (6). The method parameters are described in Table 5.5.

TABLE 5.5
GC-MS/FID method used for product detection.

| Instrument | Agilent 8890 GC with FID detection and MS | | |
|---|---|---|---|
| | (SQ) detection | | |
| Column | Agilent DB-XLB | | |
| | Length 30 mm, internal diameter 0.250 mm or | | |
| | equivalent column, film thickness: 1.0 μm. | | |
| Detector | Temperature: 300° C. | | |
| parameters | Flow H2: 30 mL/min | | |
| | Air flow: 400 mL/min | | |
| | Makeup (N2): 25 mL/min | | |
| Injector | Temperature: 300° C. | | |
| parameters | Split ratio: 200 | | |
| Carrier gas | Helium (constant 1.2 ml/min) | | |
| | Time (min) | Temperature (° C.) | Rate (° C./min) |
| Gradient | 0 | 50 | 0 |
| | 0.5 | 50 | 20 |
| | 13.0 | 300 | 0 |
| | 13.5 | 300 | Next injection |

| | |
|---|---|
| Run Time | 13.5 minutes |
| Injection volume | 1 μL |
| MS Parameters | EI-SCAN |
| Temperature | MS Source 230° C. |
| | MS Quand 150° C. |
| Detector | Low mass 30 |
| | High Mass 600 |
| | Threshold 4 |

[0253] The methods provided herein find use in analyzing the variants produced using the present invention. However, it is not intended that present invention be limited to the methods described herein, as there are other suitable methods known in the art that are applicable to the analysis of the variants provided herein and/or produced using the methods provided herein.

### Example 6

Round 7 Evolution and Screening of Engineered Polypeptides Derived from SEQ ID NO: 2 for Improved Production of Compound (IA)

[0254] The engineered polynucleotide (SEQ TD NO: 1) encoding the polypeptide with oxynitrilase activity of SEQ TD NO: 2 was used to generate the engineered polypeptides of Table 6-1. These polypeptides displayed improved oxynitrilase activity under the desired conditions e.g., the improvement in the formation of the nitro alcohol compound (IA), that was produced in situ from the substrates trifluoroacetone and nitromethane, compounds (1) and (2), respectively, as compared to the starting polypeptide. Some polypeptides displayed improved product formation of nitro alcohol product (IA) compared to the starting polypeptide are noted in Table 6-1. The engineered polypeptides, having the amino acid sequences of even-numbered sequence identifiers were generated from the “backbone” amino acid sequence of SEQ ID NO: 2, as described below together with the analytical method described in Table 5-1.

[0255] Directed evolution began with the polynucleotide set forth in SEQ ID NO: 1. Libraries of engineered polypeptides were generated using various well-known techniques (e.g., saturation mutagenesis, recombination of previously identified beneficial amino acid differences) and screened using HTP assay and analysis methods, described below, that measured the polypeptides' ability to produce compound (IA).

[0256] The enzyme assays were carried out in 96-well deep-well (1.1 mL total volume) plates, in 100 μL total reaction volume per well. The reactions contained 91 v/v % of undiluted oxynitrilase lysate, prepared as described in Example 3, 0.6 M trifluoroacetone, compound (1), 0.6 M nitromethane, compound (2), 0.1 M citrate buffer at pH 5.5. The reaction plates were heat-sealed and shaken at 150 rpm and 22° C.

[0257] After overnight incubation (˜22 hours), 300 μL/well of MTBE was added to the reaction plates. The quenched reaction plates were sealed, mixed well, and centrifuged at 4,000 rpm for 5 min. Subsequently a 150 μL aliquot of the top organic phase was removed from each well and added to a shallow well 96-well plate. For Selectivity determination the plates were sealed and analyzed by chiral GC using the analytical method described in Table 5-3. For the activity analysis by HPLC, 20 μL/well of the top organic phase of the quenched reaction plate was removed and added to a shallow well 96-well plate containing 180 μL of MeOH. The plates were sealed and mixed well. These samples were then analyzed by HPLC to determine the activity of the enzyme variants using the analytical method described in Table 5-1. Selected oxynitrilase variants showing a faster product formation of (IA), relative to SEQ ID NO:2 are shown in Table 6.1.

TABLE 6-1
Oxynitrilase Activity for the Production
of Compound (IA) Relative to SEQ ID NO: 2

| SEQ | | FIOP percent conversion Mean |
|---|---|---|
| ID NO: | Amino Acid Differences (Relative to | (T100% conv) (Relative to SEQ |
| (nt/aa) | SEQ ID NO: 2) | ID NO: 2)¹ |
| 3/4 | W39T/A105G/A261G | ++ |
| 5/6 | A105G/V146I/A261G | +++ |
| 7/8 | A105G | +++ |
| 9/10 | V143I | + |
| 11/12 | V12I/A105G/S113N | ++ |
| 13/14 | W39G/A105G/V202I/L260P | +++ |
| 15/16 | W39T | +++ |
| 17/18 | V12I/W39F/A105G/I110L/V202I/A261G | ++ |
| 19/20 | V12I/W39T/A261G | ++ |
| 21/22 | V12I/W39T/A105G/V202I/A261G | + |
| 23/24 | A99T | + |
| 25/26 | S98L | + |
| 27/28 | V12I/A105G/A261E | + |
| 29/30 | V12I/W39F/A261G | + |
| 31/32 | A105G/V202I | + |
| 33/34 | S98L/V202I/A261G | + |
| 35/36 | V12I/W39V/A105G | + |
| 37/38 | W39G/A105G/V146I | + |
| 39/40 | W39F/V97M | ++ |
| 41/42 | A261G | ++ |
| 43/44 | W39T/A261G | + |
| 45/46 | V12I/W39T/A105G | + |
| 47/48 | W39F/A105G | ++ |
| 49/50 | L260P/A261G | ++ |
| 51/52 | S211G | + |

¹Levels of increased activity were determined relative to the reference polypeptide of SEQ ID NO: 2 and defined as follows:
“+” 1.10 to 1.15 (first 50%),
“++” > 1.15 (next 30%),
“+++” > 1.22 (top 20%)

### Example 7

Round 8 Evolution and Screening of Engineered Polypeptides Derived from SEQ ID NO: 48 for Improved Production of Compound (IA)

[0258] The polynucleotide from example 6 SEQ TD NO: 47 encoding the most active polypeptide with oxynitrilase activity of SEQ TD NO: 48 was used to generate the engineered polypeptides of Table 7-1. These polypeptides displayed improved oxynitrilase activity under the desired conditions e.g., the improvement in the formation of the nitro alcohol compound (IA), that was produced in situ from the substrates trifluoroacetone and nitromethane, compounds (1) and (2), respectively, as compared to the starting polypeptide. Some polypeptides displayed improved product formation of nitro alcohol product (IA) compared to the starting polypeptide are noted in Table 7-1. The engineered polypeptides, having the amino acid sequences of even-numbered sequence identifiers were generated from the “backbone” amino acid sequence of SEQ ID NO: 48, as described below together with the analytical method described in Table 5-1.

[0259] Directed evolution began with the polynucleotide set forth in SEQ ID NO: 47. Libraries of engineered polypeptides were generated using various well-known techniques (e.g., saturation mutagenesis, recombination of previously identified beneficial amino acid differences) and screened using HTP assay and analysis methods, described below, that measured the polypeptides' ability to produce compound (IA).

[0260] The enzyme assays were carried out in 96-well deep-well (1.1 mL total volume) plates, in 100 μL total reaction volume per well. The reactions contained 20 v/v % of undiluted oxynitrilase lysate, prepared as described in Example 3, 0.62 M trifluoroacetone, compound (1), 0.63 M nitromethane, compound (2), citrate buffer at pH 5.5. The reaction plates were heat-sealed and shaken at 150 rpm and 22° C.

After overnight incubation (˜22 hours), 600 μL/well of MeOH was added to the reaction plates. The quenched reaction plates were sealed, mixed well, and centrifuged at 4,000 rpm for 15 min. Subsequently 20 μL/well of the quenched reaction plate was removed and added to a shallow well 96-well plate containing 180 μL of MeOH. The plates were sealed and mixed well. These samples were then analyzed by HPLC to determine the activity of the enzyme variants using the analytical method described in Table 5-1. Selected oxynitrilase variants showing a faster product formation of (IA), relative to SEQ ID NO:48 are shown in Table 7.1. The selectivity towards the (IA) product of the most active polypeptide SEQ ID NO: 74 was confirmed by chiral GC analysis using the analytical method described in Table 5-3 before continuing evolution as described in example 8. All variants showed an S-Selectivity >75% (>50% ee) under the given reaction conditions.

TABLE 7-1
Oxynitrilase Activity for the Production of
Compound (IA) Relative to SEQ ID NO: 48

| | | FIOP percent |
|---|---|---|
| | | conversion |
| | | Mean |
| | | (T100% conv) |
| SEQ | | (Relative to |
| ID NO: | Amino Acid Differences | SEQ ID NO: |
| (nt/aa) | (Relative to SEQ ID NO: 48) | 48)¹ |
| 53/54 | S122G | + |
| 55/56 | I9V/C13G/A261G | +++ |
| 57/58 | S122R/I132V/S211G/A261G | + |
| 59/60 | A99T/K175R/S211G/A261G | +++ |
| 61/62 | V146M/S211G/A261G | ++ |
| 63/64 | S122T | + |
| 65/66 | S122G/K175R/A261G | + |
| 67/68 | S211G/L260P | +++ |
| 69/70 | Q208M | + |
| 71/72 | N135Y | ++ |
| 73/74 | A154— | +++ |
| 75/76 | N243Q | + |
| 77/78 | N220T | + |
| 79/80 | R55C | ++ |
| 81/82 | H171A | ++ |
| 83/84 | E167M | + |
| 85/86 | D111G | + |
| 87/88 | L260Q | ++ |
| 89/90 | N160A | ++ |
| 91/92 | Q50E | + |
| 93/94 | Q208R | ++ |
| 95/96 | R55T | + |
| 97/98 | Q47S | +++ |
| 99/100 | R198M | ++ |
| 101/102 | L259R | + |
| 103/104 | Q247F | + |

¹Levels of increased activity were determined relative to the reference polypeptide of SEQ ID NO: 48 and defined as follows:
“+” 1.10 to 1.13 (first 50%),
“++” > 1.13 (next 30%),
“+++” > 1.17 (top 20%)

### Example 8

Round 9 Evolution and Screening of Engineered Polypeptides Derived from SEQ ID NO: 74 for Improved Production of Compound (IA) The polynucleotide from example 7 SEQ ID NO: 73 encoding the most active polypeptide with oxynitrilase activity of SEQ ID NO: 74 was used to generate the engineered polypeptides of Table 8-1. These polypeptides displayed improved oxynitrilase activity under the desired conditions e.g., the improvement in the formation of the nitro alcohol compound (IA), that was produced in situ from the substrates trifluoroacetone and nitromethane, compounds (1) and (2), respectively, as compared to the starting polypeptide. Some polypeptides displayed improved product formation of nitro alcohol product (IA) compared to the starting polypeptide are noted in Table 8-1. The engineered polypeptides, having the amino acid sequences of even-numbered sequence identifiers were generated from the “backbone” amino acid sequence of SEQ ID NO: 74, as described below together with the analytical method described in Table 8-1.

[0261] Directed evolution began with the polynucleotide set forth in SEQ ID NO: 73. Libraries of engineered polypeptides were generated using various well-known techniques (e.g., saturation mutagenesis, recombination of previously identified beneficial amino acid differences) and screened using HTP assay and analysis methods, described below, that measured the polypeptides' ability to produce compound (IA).

[0262] The enzyme assays were carried out in 96-well deep-well (1.1 mL total volume) plates, in 100 μL total reaction volume per well. The reactions contained 15 v/v % of undiluted oxynitrilase lysate, prepared as described in Example 3, 0.62 M trifluoroacetone, compound (1), 0.63 M nitromethane, compound (2), citrate buffer at pH 6.0. The reaction plates were heat-sealed and shaken at 150 rpm and 22° C.

[0263] After overnight incubation (˜22 hours), 300 μL/well of MeOH was added to the reaction plates. The quenched reaction plates were sealed, mixed well, and centrifuged at 4,000 rpm for 15 min. Subsequently 20 μL/well of the quenched reaction plate was removed and added to a shallow well 96-well plate containing 180 μL of MeOH. The plates were sealed and mixed well. These samples were then analyzed by HPLC to determine the activity of the enzyme variants using the analytical method described in Table 5-1. Selected oxynitrilase variants showing a faster product formation of (IA), relative to SEQ ID NO: 74 are shown in Table 8.1. Please note that oxynitrilase polypeptide with the SEQ ID NO: 142 was constructed rationally. It combines the beneficial mutations of polypeptide SEQ ID NO: 124 and SEQ ID NO: 140. The high selectivity towards the (IA) product of the most active polypeptides SEQ ID NO: 124, 140 and 142 was confirmed by chiral GC analysis using the analytical method described in Table 5-3 before continuing evolution as described in example 9. All variants showed an S-Selectivity >8000 (>6000 ee) under the given reaction conditions.

TABLE 8-1
Oxynitrilase Activity for the Production of
Compound (IA) Relative to SEQ ID NO: 74

| | | FIOP percent |
|---|---|---|
| | | conversion |
| | | Mean |
| SEQ | | (T100% conv) |
| ID NO: | Amino Acid Differences | (Relative to SEQ |
| (nt/aa) | (Relative to SEQ ID NO: 74) | ID NO: 74)¹ |
| 105/106 | V12I/R240K | ++ |
| 107/108 | V12I/L179E | + |
| 109/110 | V12I/R55E | ++ |
| 111/112 | V12I/V33A/R171L | + |
| 113/114 | V12I/S43I/N44D | + |
| 115/116 | V12I/R55E/R171L | + |
| 117/118 | V12I/V33A | ++ |
| 119/120 | V12I/R171L/L179E | + |
| 121/122 | V12I/R171L/R240K | ++ |
| 123/124 | V12I | +++ |
| 125/126 | V12I/R55E/S262A | ++ |
| 127/128 | Q207R/S231G | + |
| 129/130 | Q50E/R55C/S67R/S122G/Q207R | + |
| 131/132 | Q50E/T63S/S122G/H170A/N219T/S231G | + |
| 133/134 | S122G/Q207R/S231G | + |
| 135/136 | K129G | + |
| 137/138 | G81A | + |
| 139/140 | V2— | +++ |
| ²141/142 | V2—/V12I | n.d. |

¹Levels of increased activity were determined relative to the reference polypeptide of SEQ ID NO: 74 and defined as follows:
“+” 1.11 to 1.17 (first 50%),
“++” > 1.17 (next 30%),
“+++” > 1.28 (top 20%)
²SEQ ID 141/142 have been constructed rationally combining the best two mutations and haven't been part of the initial screening.
n.d.: not determined

### Example 9

Round 10 Evolution and Screening of Engineered Polypeptides Derived from SEQ ID NO: 142 for Improved Production of Compound (IA)

[0264] The polynucleotide from example 8 SEQ ID NO: 141 encoding the most active polypeptide with oxynitrilase activity of SEQ ID NO: 142 was used to generate the engineered polypeptides of Table 9-1. These polypeptides displayed improved oxynitrilase activity under the desired conditions e.g., the improvement in the formation of the nitro alcohol compound (IA), that was produced in situ from the substrates trifluoroacetone and nitromethane, compounds (1) and (2), respectively, as compared to the starting polypeptide. Some polypeptides displayed improved product formation of nitro alcohol product (IA) compared to the starting polypeptide are noted in Table 8-1. The engineered polypeptides, having the amino acid sequences of even-numbered sequence identifiers were generated from the “backbone” amino acid sequence of SEQ ID NO: 74, as described below together with the analytical method described in Table 8-1.

[0265] Directed evolution began with the polynucleotide set forth in SEQ ID NO:141. Libraries of engineered polypeptides were generated using various well-known techniques (e.g., saturation mutagenesis, recombination of previously identified beneficial amino acid differences) and screened using HTP assay and analysis methods, described below, that measured the polypeptides' ability to produce compound (IA).

[0266] The enzyme assays were carried out in 96-well deep-well (1.1 mL total volume) plates, in 100 μL total reaction volume per well. The reactions contained 10 v/v % of undiluted oxynitrilase lysate, prepared as described in Example 3, 0.6 M trifluoroacetone, compound (1), 0.9 M nitromethane, compound (2), citrate buffer at pH 6.0. The reaction plates were heat-sealed and shaken at 150 rpm and 22° C.

[0267] After overnight incubation (˜22 hours), 700 μL/well of MeOH was added to the reaction plates. The quenched reaction plates were sealed, mixed well, and centrifuged at 4,000 rpm for 15 min. Subsequently 20 μL/well of the quenched reaction plate was removed and added to a shallow well 96-well plate containing 180 μL of MeOH. The plates were sealed and mixed well. These samples were then diluted 1:400 with MeOH and analyzed by RF-MS to determine the activity of the enzyme variants using the analytical method described in Table 5-2. Selected oxynitrilase variants showing a faster product formation of (IA), relative to SEQ ID NO: 142 are shown in Table 9.1. The high selectivity towards the (IA) product of the most active polypeptides SEQ ID NO: 156 was confirmed by chiral GC analysis using the analytical method described in Table 5-3 before continuing evolution as described in example 10. All variants showed S-Selectivity >9000 (>80% ee) under the given reaction conditions.

TABLE 9-1
Oxynitrilase Activity for the Production of
Compound (IA) Relative to SEQ ID NO: 142

| | | FIOP |
|---|---|---|
| | | Product |
| | | Results Area |
| | | Mean |
| | | Relative |
| SEQ | | (Relative to |
| ID NO: | Amino Acid Differences | SEQ ID NO: |
| (nt/aa) | (Relative to SEQ ID NO: 142) | 142)¹ |
| 143/144 | I11V/Q49E/V123—/K128G/L257— | ++ |
| 145/146 | F38V/Q49E/I207V/R239K/L257— | ++ |
| 147/148 | I11V/F38V/Q49E/G80A/T151L/N154A/ | ++ |
| | N158M/I207V/S230G/R239K/L257— | |
| 149/150 | Q49E/L257— | + |
| 151/152 | Q49E/N154L/I207V/R239K/L257— | + |
| 153/154 | I11V/Q49E/T151L/N154A/N158C/Q206R/I207V/R239K | + |
| 155/156 | F38V/Q49E/T151L/N158M/Q206R/S230G | + |
| 157/158 | I207V/S230G | + |
| 159/160 | Q49E/T151L/N154A/N158C/I207V/R239K | + |
| 161/162 | Q49E/T151L/N154A/N158C/Q206R/I207V | + |
| 163/164 | D149Q/T151L/N158M/Q206R/S230G | + |
| 165/166 | F38V/S230G | + |
| 167/168 | E69N/G70K/K71G/L257— | + |
| 169/170 | L257— | + |
| 171/172 | L258* | +++ |
| 173/174 | S253—/A254—/S255—/D256—/L257—/L258—/A259—/V260— | ++ |
| 175/176 | D256* | +++ |
| 177/178 | L257N/A259R/V260* | ++ |
| 179/180 | N31T | + |
| 181/182 | L258A | + |
| 183/184 | A259T | ++ |
| 185/186 | Q206S | + |
| 187/188 | D110S | + |
| 189/190 | E146K | + |
| 191/192 | V260—/S261— | + |
| 193/194 | T143G | ++ |
| 195/196 | V260A | +++ |
| 197/198 | S189T | ++ |
| 199/200 | E190G | ++ |
| 201/202 | L257G | ++ |
| 203/204 | E190R | + |
| 205/206 | D126E | +++ |
| 207/208 | S255P | ++ |
| 209/210 | D256G | +++ |
| 211/212 | L257N | +++ |
| 213/214 | R196K | +++ |

¹Levels of increased activity were determined relative to the reference polypeptide of SEQ ID NO: 142 and defined as follows:
“+” 1.23 to 1.46 (first 50%),
“++” > 1.46 (next 30%),
“+++” > 1.69 (top 20%)

### Example 10

Round 11 Evolution and Screening of Engineered Polypeptides Derived from SEQ ID NO: 156 for Improved Stability in Isopropyl Acetate and Production of Compound (IA)

[0268] The polynucleotide from example 9 SEQ ID NO: 155 encoding the most active polypeptide with oxynitrilase activity of SEQ ID NO: 156 was used to generate the engineered polypeptides of Table 10-1. These polypeptides displayed improved oxynitrilase activity under the desired conditions e.g., the improvement in the formation of the nitro alcohol compound (IA), that was produced in situ from the substrates trifluoroacetone and nitromethane, compounds (1) and (2), respectively, as compared to the starting polypeptide. Some polypeptides displayed improved product formation of nitro alcohol product (IA) compared to the starting polypeptide are noted in Table 10-1. The engineered polypeptides, having the amino acid sequences of even-numbered sequence identifiers were generated from the “backbone” amino acid sequence of SEQ ID NO: 156, as described below together with the analytical method described in Table 8-3.

[0269] Directed evolution began with the polynucleotide set forth in SEQ ID NO: 155. Libraries of engineered polypeptides were generated using various well-known techniques (e.g., saturation mutagenesis, recombination of previously identified beneficial amino acid differences) and screened using HTP assay and analysis methods, described below, that measured the polypeptides' ability to produce compound (IA).

[0270] The enzyme assays were carried out in 96-well deep-well (1.1 mL total volume) plates, in 100 μL total reaction volume per well. The reactions contained 5 v/v % of undiluted oxynitrilase lysate, prepared as described in Example 3, 0.6 M trifluoroacetone, compound (1), 0.9 M nitromethane, compound (2), 30% isopropylacetate in citrate buffer at pH 6.0. The reaction plates were heat-sealed and shaken at 150 rpm and 22° C.

[0271] After overnight incubation (˜22 hours), 700 μL/well of MeOH was added to the reaction plates. The quenched reaction plates were sealed, mixed well, and centrifuged at 4,000 rpm for 15 min.

[0272] Subsequently 20 μL/well of the quenched reaction plate was removed and added to a shallow well 96-well plate containing 180 μL of MeOH. The plates were sealed and mixed well. These samples were then diluted 1:400 with MeOH and analyzed by RF-MS to determine the activity of the enzyme variants using the analytical method described in Table 5-2. Selected oxynitrilase variants showing a faster product formation of (IA), relative to SEQ ID NO: 156 are shown in Table 10.1. The high selectivity towards the (IA) product of the most active polypeptides SEQ ID NO: 234 was confirmed by chiral GC analysis using the analytical method described in Table 5-3 before continuing evolution as described in example 11. All variants showed a S-Selectivity >92% (>84% ee) under the given reaction conditions.

TABLE 10-1
Oxynitrilase Activity for the Production of
Compound (IA) Relative to SEQ ID NO: 156

| | | FIOP |
|---|---|---|
| | | Product |
| | | Results Area |
| | | Mean |
| SEQ | | (Relative to |
| ID NO: | Amino Acid Differences | SEQ ID |
| (nt/aa) | (Relative to SEQ ID NO: 156) | NO: 156)¹ |
| 215/216 | N31T/E49D/R54G/I131G/E146K/I207V/Q248G | + |
| 217/218 | N31T/E49D/R54G/E146K/S194G/R206Q/I207V/L258* | + |
| 219/220 | N31T/R54G/E146K/M158N/T183R/E190R/R206Q/I207V/ | + |
| | Q248G/L258* | |
| 221/222 | N31T/T183R | ++ |
| 223/224 | E49D/R54G/E146K/T183R/E190R/S194G/R206S/I207V/Q248G | ++ |
| 225/226 | N31T/L151T/I207V/Q248G | ++ |
| 227/228 | N31T | ++ |
| 229/230 | E146K/L151T/M158N/R206Q/I207V | ++ |
| 231/232 | R54G/L151T/R206Q/I207V/D256E | ++ |
| 233/234 | N31T/D110S/L151T/R206S | +++ |
| 235/236 | E146K/L151T/R206S/I207V/Q248G | ++ |
| 237/238 | N31T/E49D/R54G/I131G/E146K/L151T/T183R | + |
| 239/240 | N31T/E49D/R54G/D110S/E146K/T183R/S194G/R206Q/I207V/ | +++ |
| | Q248G/D256* | |
| 241/242 | N31T/S194G/R206Q | ++ |
| 243/244 | E49D/R54G/L151T/S194G/I207V | +++ |
| 245/246 | N31T/R206Q/I207V | ++ |
| 247/248 | D110S/L151T/D182Y/T183R/R206S/I207V | + |
| 249/250 | N31T/E49D/T183R/I207V | + |
| 251/252 | R54G/I131G/L151T/S194G/Q248G | ++ |
| 253/254 | N31T/R54G/E146K/E190R/R206S/I207V | + |
| 255/256 | R54G/I207V/Q248G | + |
| 257/258 | N31T/R54G/I131G/E146K/L151T/R206Q/Q248G | + |
| 259/260 | E49D/R54G/R206Q/I207V | + |
| 261/262 | N31T/R54G/D110S/E146K/L151T/M158N/T183R/R206S/I207V | ++ |
| 263/264 | N31T/E146K | ++ |
| 265/266 | S194G/R206S/I207V | + |
| 267/268 | N31T/E146K/E190R/S194G/R206S/I207V | +++ |
| 269/270 | N31T/I131G/L151T/I207V | ++ |
| 271/272 | N31T/E49D/R54G/E146K/L151T/T183R/E190R | + |
| 273/274 | E49D/R54G/L151T/R206Q/I207V | +++ |
| 275/276 | N31T/R206S | +++ |
| 277/278 | N31T/R54G/E146K/L151T/S194G/R206Q | +++ |
| 279/280 | E49D/R54G/E146K/L151T/R206Q/S255P/L257— | + |
| 281/282 | N31T/E49D/T183R/R206Q/I207V | + |
| 283/284 | N31T/R54G/E146K/S194G/R206Q/I207V | + |
| 285/286 | N31T/L151T/E190R/R206S/Q248G | + |
| 287/288 | E49D/T183R/E190R/R206Q/I207V/Q248G | + |
| 289/290 | E146K/L151T/R206Q/I207V/Q248G | + |
| 291/292 | E49D/R54G/E146K/R206S/I207V/Q248G | + |
| 293/294 | N31T/E49D/E146K/L151T/I207V/S255* | ++ |
| 295/296 | N31T/R54G/E190R/S194G/R206S/Q248G/D256* | + |
| 297/298 | N31T/M158N/R206Q/Q248G | + |
| 299/300 | C12G | +++ |
| 301/302 | V116Q | + |
| 303/304 | L7F | + |
| 305/306 | A114G | ++ |
| 307/308 | L151A | + |
| 309/310 | A244S | +++ |
| 311/312 | D108S | + |

¹Levels of increased activity were determined relative to the reference polypeptide of SEQ ID NO: 156 and defined as follows:
“+” 1.29 to 1.46 (first 50%),
“++” > 1.46 (next 30%),
“+++” > 1.55 (top 20%)

### Example 11

Round 12 Evolution and Screening of Engineered Polypeptides Derived from SEQ ID NO: 234 for Improved Production of Compound (IA)

[0273] The polynucleotide from example 10 SEQ ID NO: 233 encoding the most active polypeptide with oxynitrilase activity of SEQ ID NO: 234 was used to generate the engineered polypeptides of Table 11-1.

[0274] These polypeptides displayed improved oxynitrilase activity under the desired conditions e.g., the improvement in the formation of the nitro alcohol compound (IA), that was produced in situ from the substrates trifluoroacetone and nitromethane, compounds (1) and (2), respectively, as compared to the starting polypeptide. Some polypeptides displayed improved product formation of nitro alcohol product (IA) compared to the starting polypeptide are noted in Table 11-1. The engineered polypeptides, having the amino acid sequences of even-numbered sequence identifiers were generated from the “backbone” amino acid sequence of SEQ ID NO: 234, as described below together with the analytical method described in Table 8-3.

[0275] Directed evolution began with the polynucleotide set forth in SEQ ID NO: 233. Libraries of engineered polypeptides were generated using various well-known techniques (e.g., saturation mutagenesis, recombination of previously identified beneficial amino acid differences) and screened using HTP assay and analysis methods, described below, that measured the polypeptides' ability to produce compound (IA).

[0276] The enzyme assays were carried out in 96-well deep-well (1.1 mL total volume) plates, in 100 μL total reaction volume per well. The reactions contained 2.5 v/v % of undiluted oxynitrilase lysate, prepared as described in Example 3, 0.75 M trifluoroacetone, compound (1), 0.9 M nitromethane, compound (2), 30% isopropyl acetate in citrate buffer at pH 6.0. The reaction plates were heat-sealed and shaken at 150 rpm and 22° C.

[0277] After overnight incubation (˜22 hours), 650 μL/well of MeOH was added to the reaction plates. The quenched reaction plates were sealed, mixed well, and centrifuged at 4,000 rpm for 15 min.

Subsequently 15 μL/well of the quenched reaction plate was removed and added to a shallow well 96-well plate containing 185 μL of MeOH. The plates were sealed and mixed well. These samples were then diluted 1:400 with MeOH and analyzed by RF-MS to determine the activity of the enzyme variants using the analytical method described in Table 5-2. Selected oxynitrilase variants showing a faster product formation of (IA), relative to SEQ ID NO: 234 are shown in Table 11.1. The high selectivity towards the (IA) product of the most active polypeptides SEQ ID NO: 410 was confirmed by chiral GC analysis using the analytical method described in Table 5-3 before continuing evolution as described in example 12. All variants showed a S-Selectivity >9200 (>8400 ee) under the given reaction conditions.

TABLE 11-1
Oxynitrilase Activity for the Production of
Compound (IA) Relative to SEQ ID NO: 234

| | | FIOP |
|---|---|---|
| | | Product |
| | | Results |
| | | Area |
| SEQ | | (Relative |
| ID NO: | Amino Acid Differences | to SEQ ID |
| (nt/aa) | (Relative to SEQ ID NO: 234) | NO: 234)¹ |
| 313/314 | S40C/V200I/S206Q/A231G/I235P | + |
| 315/316 | A98G/S206Q/I207V | + |
| 317/318 | S206Q/I207V | + |
| 319/320 | T31N/S110D/T151L/S206R | ++ |
| 321/322 | T151S | + |
| 323/324 | L47M/S206R/I207V | ++ |
| 325/326 | T151S/S206Q/I207T | +++ |
| 327/328 | S110D | ++ |
| 329/330 | T151L | ++ |
| 331/332 | I22G | +++ |
| 333/334 | I22G/S206Q/I207C/A244S | +++ |
| 335/336 | I22G/S206Q/I207C | + |
| 337/338 | L17I | ++ |
| 339/340 | S206Q/I207T | ++ |
| 341/342 | I207V | + |
| 343/344 | L184M/I217V | +++ |
| 345/346 | L63A | ++ |
| 347/348 | S27G | ++ |
| 349/350 | Y201C | ++ |
| 351/352 | W127A | +++ |
| 353/354 | L63E | + |
| 355/356 | F187L | + |
| 357/358 | A254G | ++ |
| 359/360 | V38Y | + |
| 361/362 | A28W | +++ |
| 363/364 | F124T | + |
| 365/366 | Y226L | ++ |
| 367/368 | W127S | ++ |
| 369/370 | S112G | +++ |
| 371/372 | I195S | ++ |
| 373/374 | V38C | + |
| 375/376 | Y201L | + |
| 377/378 | L184Q | ++ |
| 379/380 | Y201E | + |
| 381/382 | L152I | + |
| 383/384 | H169R | +++ |
| 385/386 | V164L | +++ |
| 387/388 | L63Q | +++ |
| 389/390 | F124D | + |
| 391/392 | Y201S | ++ |
| 393/394 | E49D/R54G/E146K/T151L/T183R/S194G/S206Q/I207V/Q248G | + |
| 395/396 | S40C/E49D/R54G/E146K/T151L/T183R/S194G/S206Q/I207V/ | + |
| | Q248G/D256* | |
| 397/398 | E49D/R54G/A98G/E146K/T151L/T183R/S194G/S206Q/I207V/ | + |
| | Q248G | |
| 399/400 | R54G/E146K/T151L/T183R/S194G/S206Q/I207V/Q248G/D256* | + |
| 401/402 | E49D/R54G/V116Q/E146K/T151L/T183R/S194G/S206Q/I207V/ | + |
| | A231G/Q248G/D256* | |
| 403/404 | F5V/R54G/E146K/T151L/T183R/S194G/S206Q/I207V/Q248G/ | + |
| | D256* | |
| 405/406 | E49D/R54G/T151L/T183R/S194G/Y199G/S206Q/I207V/A231G/ | + |
| | Q248G/D256* | |
| 407/408 | E49D/R54G/E146K/T151L/T183R/S194G/S206Q/I207V/A231G/ | + |
| | Q248G/D256* | |
| 409/410 | R54G/E146K/T151L/T183R/S194G/S206Q/I207V/A231G/Q248G/ | + |
| | D256* | |
| 411/412 | F5V/E49D/R54G/E146K/T151L/T183R/S194G/S206Q/I207V/ | + |
| | Q248G/D256* | |

¹Levels of increased activity were determined relative to the reference polypeptide of SEQ ID NO: 234 and defined as follows:
“+” 1.18 to 1.29 (first 50%),
“++” > 1.29 (next 30%),
“+++” > 1.41 (top 20%)

### Example 12

Round 13 Evolution and Screening of Engineered Polypeptides Derived from SEQ ID NO: 410 for Improved Production of Compound (IA)

[0278] The polynucleotide from example 11 SEQ ID NO: 409 encoding the most active polypeptide with oxynitrilase activity of SEQ ID NO: 410 was used to generate the engineered polypeptides of Table 12-1. These polypeptides displayed improved oxynitrilase activity under the desired conditions e.g., the improvement in the formation of the nitro alcohol compound (IA), that was produced in situ from the substrates trifluoroacetone and nitromethane, compounds (1) and (2), respectively, as compared to the starting polypeptide. Some polypeptides displayed improved product formation of nitro alcohol product (IA) compared to the starting polypeptide are noted in Table 12-1. The engineered polypeptides, having the amino acid sequences of even-numbered sequence identifiers were generated from the “backbone” amino acid sequence of SEQ ID NO: 410, as described below together with the analytical method described in Table 8-3.

[0279] Directed evolution began with the polynucleotide set forth in SEQ ID NO: 409. Libraries of engineered polypeptides were generated using various well-known techniques (e.g., saturation mutagenesis, recombination of previously identified beneficial amino acid differences) and screened using HTP assay and analysis methods, described below, that measured the polypeptides' ability to produce compound (IA).

[0280] The enzyme assays were carried out in 96-well deep-well (1.1 mL total volume) plates, in 100 μL total reaction volume per well. The reactions contained 5 v/v % of undiluted oxynitrilase lysate, prepared as described in Example 3, 0.75 M trifluoroacetone, compound (1), 0.9 M nitromethane, compound (2), 30% isopropyl acetate in citrate buffer at pH 6.0. The reaction plates were heat-sealed and shaken at 150 rpm and 22° C.

[0281] After overnight incubation (˜22 hours), 650 μL/well of MeOH was added to the reaction plates. The quenched reaction plates were sealed, mixed well, and centrifuged at 4,000 rpm for 15 min.

Subsequently 15 μL/well of the quenched reaction plate was removed and added to a shallow well 96-well plate containing 185 μL of MeOH. The plates were sealed and mixed well. These samples were then analyzed by HPLC to determine the activity of the enzyme variants using the analytical method described in Table 5-1. Selected oxynitrilase variants showing a faster product formation of (IA), relative to SEQ ID NO: 410 are shown in Table 12.1. The high S-selectivity of >95% (>90% ee) towards the (IA) product of the most active polypeptides SEQ ID NO: 414 was confirmed by chiral GC analysis using the analytical method described in Table 5-3 before continuing evolution as described in example 13. All other variants also showed a high S-selectivity >94% (>88% ee) under the given reaction conditions.

TABLE 12-1
Oxynitrilase Activity for the Production of
Compound (IA) Relative to SEQ ID NO: 410

| | | FIOP percent |
|---|---|---|
| | | conversion |
| SEQ | | Mean (Relative |
| ID NO: | Amino Acid Differences | to SEQ ID NO: |
| (nt/aa) | (Relative to SEQ ID NO: 410) | 410)¹ |
| 413/414 | S27G/A28W/L63A/G194S/Y201C | +++ |
| 415/416 | L17I/L63A/S112G/Y226L | +++ |
| 417/418 | L17I/I22G/L63Q/S112G/K146E/G248Q | ++ |
| 419/420 | I22R/S27G/A28W/H169R/G194S/I195S | ++ |
| 421/422 | I22G/H169R/G194S/I195S | + |
| 423/424 | L17I/L63A/S112G/Y201C/Y226L | +++ |
| 425/426 | L17I/L63Q/S112G | ++ |
| 427/428 | L17I/S27G/L63Q/K146E/H169R/Y201C | +++ |
| 429/430 | L17I/S27G/A28W/L63A/S112G/I195S/G248Q | ++ |
| 431/432 | I22G/S112G/L151T/M158N/H169R/V207T | +++ |
| 433/434 | V38F/S110D/W127A/K146E/L151T/V207T | ++ |
| 435/436 | D182Q | + |
| 437/438 | S255M | ++ |
| 439/440 | K119G | + |
| 441/442 | T143V | + |
| 443/444 | N154G | + |
| 445/446 | N134F | ++ |
| 447/448 | D149T | + |
| 449/450 | V123T | +++ |
| 451/452 | D182W | ++ |
| 453/454 | N154S | +++ |
| 455/456 | D149V | +++ |
| 457/458 | K128S | ++ |
| 459/460 | S255N | ++ |
| 461/462 | N252K | +++ |
| 463/464 | A3M | ++ |
| 465/466 | D149H | ++ |
| 467/468 | N154V | +++ |
| 469/470 | P107V | ++ |
| 471/472 | S255K | ++ |
| 473/474 | I8V | + |
| 475/476 | D149S | +++ |
| 477/478 | L17V | ++ |
| 479/480 | N134W | ++ |
| 481/482 | D126M | ++ |
| 483/484 | K118N/P229S | +++ |
| 485/486 | A254L | +++ |
| 487/488 | N134C | +++ |
| 489/490 | I8C | + |
| 491/492 | D182L | +++ |
| 493/494 | Q213F | +++ |
| 495/496 | M106Q | ++ |
| 497/498 | D180S | ++ |
| 499/500 | A254V | + |
| 501/502 | V102L | + |
| 503/504 | K146A | + |
| 505/506 | V117A | ++ |
| 507/508 | S253V | +++ |
| 509/510 | K119S | + |
| 511/512 | D182A | + |
| 513/514 | Q216E | + |
| 515/516 | E122A | + |
| 517/518 | S253I | + |
| 519/520 | K119V | + |
| 521/522 | E122S | + |
| 523/524 | S209L | + |
| 525/526 | I83V | + |
| 527/528 | A79G | + |
| 529/530 | I8L | + |
| 531/532 | S133C | + |
| 533/534 | S255R | + |
| 535/536 | T141V | + |
| 537/538 | S2L | + |
| 539/540 | S2T | ++ |
| 541/542 | Q179S | + |
| 543/544 | E122G | + |
| 545/546 | K173C | + |
| 547/548 | D182V | + |
| 549/550 | Q206L | + |
| 551/552 | Q213V | + |
| 553/554 | L151V | + |
| 555/556 | E122M | + |
| 557/558 | K173W | + |
| 559/560 | S255W | + |
| 561/562 | N154A | + |
| 563/564 | M106L | ++ |
| 565/566 | I83M | + |
| 567/568 | T141Q | + |
| 569/570 | E122T | + |
| 571/572 | I131G | + |
| 573/574 | S255V | ++ |
| 575/576 | D182G | + |
| 577/578 | K173L | +++ |
| 579/580 | Q213M | +++ |
| 581/582 | N134V | ++ |
| 583/584 | S255Q | + |
| 585/586 | L178I | + |
| 587/588 | F101L | + |
| 589/590 | K119R | ++ |
| 591/592 | S253C | ++ |
| 593/594 | S2G | ++ |
| 595/596 | K118R | ++ |
| 597/598 | K128M | + |
| 599/600 | D149G | ++ |
| 601/602 | S121V | + |
| 603/604 | K128R | + |

¹Levels of increased activity were determined relative to the reference polypeptide of SEQ ID NO: 410 and defined as follows:
“+” 1.23 to 1.74 (first 50%),
“++” > 1.74 (next 30%),
“+++” > 2.12 (top 20%)

### Example 13

### Comparison of the Catalytic Activity and Selectivity of the Wildtype Polypeptide SEQ ID NO: 606 and the Engineered Polypeptides SEQ ID NO: 2

[0282] Both, the polynucleotides SEQ ID NO: 605 encoding for the wildtype (S)-hydroxynitrile lyase from Baliospermum montanum, Uniprot ID: D1MX73 with the SEQ ID NO: 606 and the engineered polynucleotide SEQ ID NO: 1 encoding for the starting enzyme from example 6 with the SEQ ID NO: 2, have been used for SFP production as described in example 4.

[0283] The catalytic activity and selectivity to convert the substrates trifluoroacetone (1) and nitromethane (2) to the desired nitro alcohol compound (IA) was conducted in a 96-well deep well plate (1.1 mL total volume) with 100 μL total reaction volume per well. The reactions contained 0 g/L, 0.049 g/L, 0.098 g/L, 0.195 g/L, 0.391 g/L, 0.781 g/L, 1.563 g/L, 3.125 g/L, 6.25 g/L, 12.5 g/L, 25 g/L, 50 g/L of SFP, prepared as described in Example 3, 0.623 M (70 g/L) trifluoroacetone (1), 0.631 M (39 g/L) nitromethane (2), in 100 mM citrate buffer at pH 5.5. Each reaction was conducted in duplicate. Two reaction plates were set-up in parallel, one was used for chiral GC analysis, the other one for achiral LC analysis. Both reaction plates were heat-sealed and shaken at 150 rpm and 22° C. After overnight incubation (˜22 hours), 450 μL/well of MTBE was added to the GC reaction plate and 650 μL/well of MeOH was added to the LC reaction plate. The quenched reaction plates were sealed, mixed well, and centrifuged at 4,000 rpm for 15 min.

[0284] Subsequently 15 μL/well of the quenched LC reaction plate was removed and added to a shallow well 96-well plate containing 185 μL of MeOH. The plate was sealed and mixed well. These samples were then analyzed by HPLC to determine the activity of the enzyme variants using the analytical method described in Table 5-1.

[0285] For the selectivity and enantiomeric excess (ee) analysis 150 μL/well of the top organic phase of the quenched GC reaction plate was removed and added to a shallow well 96-well plate. This plate was then analyzed by chiral GC utilizing the analytical method described in Table 5-3. FIG. 1 clearly shows the higher selectivity and activity of SEQ ID 2 compared to the wildtype polypeptide SEQ ID 606.

[0286] Comparative data in FIGS. 1A and 1B show the percentage conversion and enantiomeric excess, respectively, of trifluoroacetone (1) and nitromethane (2) to the nitro alcohol compound (IA) with the wildtype (S)-hydroxynitrile lyase from Baliospermum montanum, Uniprot ID: D1MX73 having SEQ ID NO: 606 versus the engineered polypeptide SEQ ID NO: 2. The experiment was conducted in duplicate. The reaction mixture contained 0.623 M (70 g/L) trifluoroacetone (1), 0.631 M (39 g/L) nitromethane (2), in 100 mM citrate buffer at pH 5.5 and varying SFP catalyst concentrations from 0-50 g/L. The engineered polypeptides with the SEQ ID NO: 2 showed a higher selectivity and activity than the wildtype polypeptide SEQ ID NO: 606. As the selective enzymatic reaction is always in competition with the unselective chemical reaction in parallel, the selectivity of the SEQ ID NO: 606 oxynitrilase (>90%) only resulted in an actual ee of max 25%. Therefore the evolution campaign described in this disclosure was set out to further improve the activity of the enzyme while maintaining the high selectivity.

[0287] In a follow up experiment the best enzyme of each evolution round has been used for the transformation of the substrates trifluoroacetone (1) and nitromethane (2) to the desired nitro alcohol compound (IA). If not stated otherwise the experimental procedure is the same as in FIGS. 1A and 1B showing the comparison to the wildtype sequence. The enzyme SFPs have been prepared as described in example 3 and used in the following concentrations 0 g/L, 0.049 g/L, 0.098 g/L, 0.195 g/L, 0.391 g/L, 0.781 g/L, 1.563 g/L, 3.125 g/L, 6.25 g/L, 12.5 g/L SFP. Two different conditions have been investigated, (1^{st}): Initial screening conditions of example 6 and 7 with 0.623 M (70 g/L) trifluoroacetone (1), 0.631 M (39 g/L) nitromethane (2), in 100 mM citrate buffer at pH 5.5 (see FIG. 2A, 2B) and (2^{nd}): Final screening conditions of example 11, 12 and 13 with 0.75 M (84 g/L) trifluoroacetone (1), 0.9 M (55 g/L) nitromethane (2), 30% isopropylacetate in 100 mM citrate buffer at pH 6.0 (see FIG. 2C, 2D). FIGS. 2A and 2C show the percentage conversion whereas FIGS. 2B and 2D show the enantiomeric excess of the most active polypeptides from each round for the conversion of trifluoroacetone (1) and nitromethane (2) to the nitro alcohol compound (IA). As shown in FIG. 2 the ranking of the different enzyme variants is matching well under both conditions to the progress made from round to round. The oxynitrilase with the SEQ ID NO: 414 shows the highest selectivity and conversion under both conditions. However while under 1^{st} condition SEQ ID NO: 414 with 12.5 g/L SFP loading reached 91% conversion, and 87% ee (see FIGS. 2A, 2B), it reached with an loading of only 6.25 g/L under the improved 2^{nd} reaction conditions 100% conversion and 93% ee (see FIGS. 2C, 2D). The enzyme having SEQ ID NO: 414 was then used in a scale-up reaction, see example 14.

### Example 14

Production of Nitro Alcohol Compound (IA), from the Substrates Trifluoroacetone (1) and Nitromethane (2) with Engineered Polypeptide SEQ ID NO: 414 as Catalyst

[chemical structure]

[0288] The most active polypeptide with oxynitrilase activity from example 12, SEQ ID NO: 414 was produced as fermentation powder and used to convert the substrates trifluoroacetone (1) and nitromethane (2) to the nitro alcohol compound (IA). 0.504 g of polypeptide SEQ ID NO: 414 was dissolved in sodium citrate buffer (4.0 mL, 0.1 M, pH 6.0±0.5) and loaded into a reactor pre-cooled to 10° C. A 10° C. solution of trifluoroacetone (12.13 g, 108.3 mmol) in sodium citrate buffer (27.8 mL, 0.1 M, pH 6.0), and additional sodium citrate buffer (78.6 mL, 0.1 M, pH 6.0) were charged to the reactor. The internal temperature and stirring was set to 22° C. and 350 rpm before nitromethane (13.2 g, 11.7 mL, 216.5 mmol), followed by isopropyl acetate (10.2 g, 11.7 mL), was added. Additional isopropyl acetate (21.1 g, 24.3 mL) was added and stirred at 22° C. for 22 h. CellFlock 40 (6.0 g) and isopropyl acetate (5.0 g, 5.7 mL) were added to the emulsion and stirred at 22° C. for 2 h. The resulting suspension was filtered to afford a clear biphasic mixture. The aqueous layer was separated and extracted with isopropyl acetate. The combined organic layers were concentrated at 50° C. jacket temperature and 180-200 mbar. Some isopropyl acetate was added to the obtained distillation residue, that was again concentrated. This sequence was repeated one more time to obtain the nitro alcohol at the desired concentration in isopropyl acetate (91.7 g solution containing 16.84 g nitro alcohol, 90.8% yield, e.r.=96:4). ¹H NMR (DMSO-d6): 6.96 (s, OH), 4.92 (d, 1H), 4.82 (d, 1H), 1.48 (s, 3H)

### Example 15

Production of Nitro Alcohol Compound (IA), from the Substrates Trifluoroacetone (1) and Nitromethane (2) with Whole Cells Contained the Engineered Polypeptide SEQ ID NO: 254

[0289] The polynucleotide from Example 10 having SEQ ID NO: 233 encoding the most active polypeptide from Example 10 with oxynitrilase activity having SEQ ID NO: 234 was produced in the three different enzyme formulation forms as described in Example 4, e.g., as SFP, FWC or LWC. All the three formulations allowed successful formation of the nitro alcohol compound (IA), that was produced in situ from the substrates trifluoroacetone and nitromethane, compounds (1) and (2), respectively.

The enzyme assays were carried out in 96-well deep-well (1.1 mL total volume) plates, in 100 μL total reaction volume per well. The reactions contained one of the three oxynitrilase formulations (SFP, LWC or FWC) and 0.62 M trifluoroacetone, compound (1), 0.98 M nitromethane, compound (2), 30% isopropyl acetate in citrate buffer at pH 6.0. The reaction plates were heat-sealed and shaken at 150 rpm and 22° C.
After overnight incubation (˜22 hours), 300 μL/well of MTBE was added to the reaction plates. The quenched reaction plates were sealed, mixed well, and centrifuged at 4,000 rpm for 5 min. Subsequently a 150 μL aliquot of the top organic phase was removed from each well and added to a shallow well 96-well plate. For Selectivity determination the plates were sealed and analyzed by chiral GC using the analytical method described in Table 5-3. For the activity analysis by HPLC, 20 μL/well of the top organic phase of the quenched reaction plate was removed and added to a shallow well 96-well plate containing 180 μL of MeOH. The plates were sealed and mixed well. These samples were then analyzed by HPLC to determine the activity of the enzyme variants using the analytical method described in Table 5-1.

[0290] Using the catalyst in the three formulations: SFP, FWC or LWC originating from the same amounts of cells normalized to a loading of 20 μg/l SFP, 50% conversion to (IA) was observed utilizing the SFP formulation, 55% conversion for the LWC formulation and 65% conversion using FWCs after 20 hours reaction time. All samples showed an S-Selectivity of 93%.

### Example 16

### Immobilization of Engineered Polypeptide SEQ ID NO: 410

[0291] Fermentation powder of the polypeptide SEQ ID NO: 410 with oxynitrilase activity was immobilized on solid methoxy methacrylate carriers. This allows faster filtration and recycling of the polypeptide thus enable more flexible process options for nitroaldol reaction from substrates (1) and (2) to product (IA). As a proof on concept polypeptide SEQ ID NO: 410 was crosslinked on epoxy (ECR8204F) or amino-functionalized methacrylate resins (ECR8304F) from Purolite Inc. For this, 6 g of each resin was used and all washing steps were performed in the ratio of 1:4 (resin:washing solution). The resins were initially washed with immobilization buffer, 1 M (for ECR8204F) and 50 mM (for ECR8304F)) sodium citrate buffer pH 6.0. For the crosslinking on amino-functionalized methacrylate resins (ECR8304F) incubation with 1% glutardialdehyde solution for 2 hours was conducted and the activated resin was washed three times with immobilization buffer. Afterwards both resins were incubated with at 15 mg/mL solution of lyophilized polypeptide SEQ ID: 410 in immobilization buffer overnight. Both types of resin (ECR8304F & ECR8204F) were washed once with 20 mM sodium citrate buffer pH 6.0 and twice with 0.5 M brine. Afterwards both resins were washed with 50 mM sodium citrate buffer pH 6.0 three times.

These resins were then used under similar reaction conditions as in example 12, 170 mg immobilized enzyme was incubated for 22 h, 22° C. in 1 ml 0.1 M citrate buffer pH 6 containing 0.85 M (1), 1.02 M (2) and isopropyl acetate (IPAc) concentrations between 20% to 88%. After overnight incubation, 650 μL/well of MeOH was added to the reaction plates. The quenched reaction plates were sealed, mixed well, and centrifuged at 4,000 rpm for 15 min. Subsequently μL/well of the quenched reaction plate was removed and added to a shallow well 96-well plate containing 185 μL of MeOH. The plates were sealed and mixed well. These samples were then analyzed by HPLC to determine the activity of the enzyme variants using the analytical method described in Table 5-1. FIG. 3 shows the Activity (See FIG. 3A) and Selectivity (See FIG. 3B) of the free enzyme compared to the immobilized enzymes on either amino or epoxy carrier. As shown in FIG. 3 the amino resin outperformed the epoxy resin in terms of conversion (See FIG. 3A) and immobilization yield, while selectivity was similar in all cases (See FIG. 3B). High isopropyl acetate (IPAc) concentrations (ranging between 20% and 88%) were applied in the screening. Please Note that the substrate solution itself had a volume of 12% and for samples with 88 vol % IPAc the IPAc was water-saturated prior to the reaction.

[0292] The conditions for the amino resin had been further optimized and the best conditions have been used for an upscaled immobilization reaction. For this, 30 g of ECR8304F from Purolite Inc. was used and all washing steps were performed in the ratio of 1:4 (resin:washing solution). The resins were initially washed with 50 mM sodium citrate pH 6.0 immobilization buffer. For the crosslinking incubation with 1% glutardialdehyde solution for 2 hours was conducted and the activated resin was washed three times with immobilization buffer. Afterwards both resins were incubated with a 20 mg/mL solution of FP of the polypeptide SEQ ID: 410 in immobilization buffer overnight. Both resins were washed once with 20 mM sodium citrate buffer pH 6.0, twice with 0.5 M brine and twice with buffer. This procedure resulted in a immobilization yield of 70-80% and an overall recovered enzyme activity of ˜30%. The so generated 30 g of immobilized polypeptide SEQ ID NO: 410 was incubated for 22 h, 22° C. in 180 ml 0.1 M citrate buffer pH 6 containing 0.61 M (1), 1.22 M (2) and 30% IPAc resulting in 80% yield and 92% ee (96% S-Selectivity). This immobilized enzyme was recycled two times by filtering the reaction mixture and no significant loss in reaction yield and selectivity was observed. The second recycling was done after 25 days of total storage time at 4° C.

### Example 17

### Hydrogenation of Compound of Formula (IA)

[chemical structure]

### Batch Procedure

[0293] (IA) in isopropyl acetate (70.0 g, 13.7 wt.-%, 9.6 g pure (IA)) was placed in a pressure vessel. Water wet Nickel sponge catalyst (Raney Ni) (0.96 g, 10 wt.-% to pure (IA)) was added, followed by methanol (20 g, 15.8 mL). The vessel was made inert with Nitrogen and the atmosphere was then changed to hydrogen. The resulting suspension was stirred for 6 h at 40° C. under a positive pressure of hydrogen (20 bar). The reaction mixture was then cooled to room temperature, filtered in a manner to keep the filter residue wet to avoid ignition on contact with air. The conversion to (IB) was measured using GC (99% conversion).

[0294] HCl (1.25 M in MeOH, 2.0 eq) was added and stirred at room temperature for 6 h. The resulting solution was filtered before being concentrated at 40° C. jacket temperature and 60 mbar. Some isopropyl acetate was added to the obtained distillation residue, that was again concentrated. This sequence was repeated two more times to obtain the HCl salt of the amino alcohol free of methanol. Acetonitrile was added and the obtained solution was heated to 35° C. jacket temperature before n-heptane followed by a suspension of product seed material in n-heptane (one part (IB). HCl and 33 parts n-heptane) was added slowly. Additional n-heptane was added and the resulting mixture was slowly cooled to 5° C. jacket temperature. Stirring was continued for 18 h. The suspension was filtered, and the filter cake was washed with some n-heptane. The filter cake was dried under vacuum before being dissolved in acetonitrile and heated to 35° C. jacket temperature. n-Heptane was added followed by a suspension of product seed material, which consists of one part (IB). HCl and 33 parts n-heptane. Additional n-heptane was added and the resulting suspension was cooled to −1° C. jacket temperature. Stirring was continued for 18 h. Afterwards, the resulting suspension was filtered and the filter cake was washed with n-heptane. The filter cake was dried under vacuum at room temperature to afford the desired product, i.e. crystallized (IB).

[0295] HCl (6.1 g, 61% yield, e.r. 99:1). ¹H NMR (DMSO-d₆): 8.32 (br s, NH₃⁺), 6.84 (br s, OH), 2.99 (s, 2H), 1.39 (s, 3H). ¹³C NMR (DMSO-d₆): 125.8 (CF₃), 70.4 (C—CF₃), 42.2 (CH₂), 18.6 (CH₃).

### Flow Procedure

[0296] A stainless steel cartridge having an internal diameter of 9.5 mm and a length of 90 mm, was packed with a mixture of water-damp sponge-nickel (14.5 g) and inert silicon carbide (9.58 g) which had been previously thoroughly mixed. The cartridge is fitted with liquid and gas inlets, and contains an 5-μm frit preventing solid materials from leaving the cartridge at the outlet. At start-up the catalyst-loaded cartridge was placed in a water-ice bath and flushed with a 1:4 v/v mixture of methanol and isopropyl acetate for not less than 12 column volumes. The liquid stream was then switched to a 0.25 M solution of (IA) in a 1:4 v/v mixture of methanol and isopropyl acetate. The feed was also pre-cooled in an ice bath to 0 to 5 degrees Celsius. The feed was supplied to the cartridge at a flow rate of 3 mL/min by a gear-pump. Hydrogen gas was generated by electrolysis of water, and supplied at a flow rate of 99.0 mL/min by a mass-flow controller, and the entire setup was pressurized to 10 bar using a back-pressure regulator. Accounting for the presence of hydrogen gas a superficial residence time of 31 seconds was calculated. Each pass through the cartridge provides a conversion to product of between 50 and 60 A %, upon which the solution containing product was added back into the feed bottle and passed again through the cartridge until a total of 3 passes had taken place.

[0297] For an experiment with a 180 minute duration, a total of 17.92 g of starting material was employed in a volume of 500 mL solvent (4.0 m %). Conversion to product after 3 passes was 98 A %, and upon work-up of liquid-fractions to the hydrochloric acid salt of the product (according to the standard crystallization method employing HCl/methanol as described previously), an isolated yield of 75% was observed with a quality of 99 A % HPLC.

### Example 18

### Coupling Process to Synthesise Compound (IC)

[chemical structure]

[0298] E6 (41.4 g, 152 mMol) and crystallized (IB). HCl (30 g, 167 mMol) were charged to a reactor followed by 410 ml of toluene. Under stirring, triethylamine (38 g, 380 mMol) followed by tetramethyl orthosilicate (TMOS) (46 g, 304 mMol) were added. The reaction mixture was heated up to 110° C. and stirred for 3 to 16 h while methanol, formed by the reaction, is distilled off slowly. Completion of the reaction was monitored by HPLC. An aqueous NaOH solution (330 ml, 2 molar) was added and the mixture was stirred for 2 h at 50° C. The aqueous phase was separated and discarded. At 50° C. aqueous HCl (330 ml, 10%) was added and the aqueous phase discarded. After a water wash, the organic solution was dried and concentrated by distillation. (IC) was crystallized by addition of 240 ml of n-heptane and cooling to 0° C. After drying at 40° C. under vacuum the compound (IC) was obtained in 80% yield (44 g). ¹H-NMR (DMSO-d₆): δ ppm 8.29 (m, 1H), 7.67 (s, 1H), 6.68 (br, 2H), 6.28 (s, 1H), 3.92 (s, 3H), 3.69-3.43 (m, 2H), 1.25 (s, 3H). ¹³C-NMR (DMSO-d₆): δ ppm 18.95, 42.2, 53.5, 72.6-71.9 (m), 116.5-115.6 (m), 124.9-121.0 (2C, m), 126.3, 128.3 (m), 140.9, 148.5, 166.3.

### Example 19

Round 14 Evolution and Screening of Engineered Polypeptides Derived from SEQ ID NO: 606 for Improved Production of Compound (IA)

[0299] The polynucleotide from example 12 SEQ ID NO: 413 encoding the most active polypeptide with oxynitrilase activity of SEQ ID NO: 414 was used to generate the engineered polypeptides of Table 19-1. These polypeptides displayed improved oxynitrilase activity under the desired conditions e.g., higher thermostability and the improvement in the formation of the nitro alcohol compound (IA), that was produced in situ from the substrates trifluoroacetone and nitromethane, compounds (1) and (2), respectively, as compared to the starting polypeptide. Some polypeptides displayed improved product formation of nitro alcohol product (IA) compared to the starting polypeptide are noted in Table 19-1. The engineered polypeptides, having the amino acid sequences of even-numbered sequence identifiers were generated from the “backbone” amino acid sequence of SEQ ID NO: 414, as described below together with the analytical method described herein.

[0300] Directed evolution began with the polynucleotide set forth in SEQ ID NO: 413. Libraries of engineered polypeptides were generated using various well-known techniques (e.g., saturation mutagenesis, recombination of previously identified beneficial amino acid differences) and screened using HTP assay and analysis methods, described below, that measured the polypeptides' ability to produce compound (IA).

[0301] The enzyme assays were carried out in 96-well deep-well (1.1 mL total volume) plates, in 100 μL total reaction volume per well. The reactions contained 5 v/v % of undiluted oxynitrilase lysate, prepared as described in Example 3 and had then been either preincubated for 1 h at 4° C. (noted with “no thermoincubation” in Tab. 19-1) or 52° C. (noted with “thermoincubation” in Tab. 19-1). All the other conditions did not vary to the previous round of evolution: 0.75 M trifluoroacetone, compound (1), 0.9 M nitromethane, compound (2), 30% isopropyl acetate in citrate buffer at pH 6.0. The reaction plates were heat-sealed and shaken at 150 rpm and 22° C.

[0302] After overnight incubation (˜22 hours), 650 L/well of MeOH was added to the reaction plates. The quenched reaction plates were sealed, mixed well, and centrifuged at 4,000 rpm for 15 mnt.

[0303] Subsequently 15 μL/well of the quenched reaction plate was removed and added to a shallow well 96-well plate containing 185 μL of MeOH. The plates were sealed and mixed well. These samples were then analyzed by TIPLC to determine the activity of the enzyme variants using the analytical method described in Table 5-1. Selected oxynitrilase variants showing a faster product formation of (IA), relative to SEQ ID NO: 414 are shown in Table 19-1. The high S-selectivity of >9500 (>9000 ee) towards the (IA) product of the most active polypeptides SEQ ID NO: 610 and 620 was confirmed by chiral GC analysis using the analytical method described in Table 5-3.

TABLE 19-1
Oxynitrilase Activity for the Production of
Compound (IA) Relative to SEQ ID NO: 414

| | | FIOP percent | |
|---|---|---|---|
| | | conversion | FIOP percent |
| | | Mean - no | conversion |
| | | thermo- | Mean - thermo- |
| SEQ | | incubation | incubation |
| ID NO: | Amino Acid Differences | (Relative to SEQ | (Relative to SEQ |
| (nt/aa) | (Relative to SEQ ID NO: 414) | ID NO: 414)¹ | ID NO: 414)² |
| 607/608 | K221I | +++ | − |
| 609/610 | A63Q/V123T | +++ | − |
| 611/612 | K221D | ++ | − |
| 613/614 | R170S | ++ | ++ |
| 615/616 | E249K | ++ | − |
| 617/618 | V123T | + | + |
| 619/620 | E190A | +++ | ++ |
| 621/622 | S133F | + | − |
| 623/624 | G27S/D182K | ++ | − |
| 625/626 | R170L | + | + |
| 627/628 | L17V/S253C/S255V | + | + |
| 629/630 | K221G | ++ | − |
| 631/632 | S194G | + | − |
| 633/634 | K221V | + | − |
| 635/636 | S66D | + | ++ |
| 637/638 | R196P | + | + |
| 639/640 | R210K | + | + |

¹Levels of increased activity were determined relative to the reference polypeptide of SEQ ID NO: 414 and defined as follows:
“+” .99 to 1.13 (first 50%),
“++” > 1.13 (next 30%),
“+++” > 1.16 (top 20%)
²Levels of increased activity were determined relative to the reference polypeptide of SEQ ID NO: 414 and defined as follows:
“−” .45 to .98 (first 50%),
“+” > .98 (next 30%),
“++” > 1.16 (top 20%)

### Example 20

### Substrate Scope of Evolved Oxynitrilases

[chemical structure]

[chemical structure]

[chemical structure]

[chemical structure]

[0304] From different rounds of evolution the most active polypeptide with oxynitrilase activity, SEQ ID NO: 2, 156, 414 and 606 were produced as shake flask powder (SFP) and tested for their oxynitrilase activity on different substrate mixtures. Reaction 1 was the reference reaction with trifluoroacetone (1) and nitromethane (2) as substrates to form the nitro alcohol compound (IA). In reaction 2 the oxynitrilases were incubated with trifluoroacetone (1) and nitroethane (3) to investigate formation of 1,1,1-trifluoro-2-methyl-3-nitrobutan-2-ol (4). In reaction 3 acetophenone (5) and nitromethane (2) were tested as substrates to investigate formation of the product 1-nitro-2-phenylpropan-2-ol (6) and in reaction 4 2,2,2-trifluoro-1-phenylethan-1-one (7) and nitromethane (2) were tested as substrates to investigate formation of 1,1,1-trifluoro-3-nitro-2-phenylpropan-2-ol (8).

[0305] In a first experimental setup the oxynitrilase variants were investigated for their activity in regards of reaction 1, 2 and 3. The enzyme assays were carried out in 96-well deep-well plates (2 mL total volume), in 400 μL total reaction volume per well. The reaction mixture contained 0.1 M sodium citrate buffer pH 6.0, 10vol % iPrOAc and in reaction 1:1 g/L (9 mM) trifluoroacetone (1) and 11 g/L (180 mM) nitromethane (2); in reaction 2:1 g/L (9 mM) trifluoroacetone (1) and 13.5 g/L (180 mM) nitroethane (3); and in reaction 3:1.1 g/L (9 mM) acetophenone (5) and 11 g/L (180 mM) nitromethane (2). The reaction plates were heat-sealed and shaken at 200 rpm and 22° C.

[0306] After overnight incubation (˜22 hours), 1.2 ml/well of MeOH was added to the reaction plates. The quenched reaction plates were sealed, mixed well, and centrifuged at 4,000 rpm for 10 min. Subsequently 200 μL/well of the quenched reaction was transferred to a shallow well 96-well plate for HPLC-MS analytics to determine the activity of the enzyme variants using the analytical method described in Table 5.4. The relative product peak areas observed for the reaction setup 1,2 and 3 are shown in Table 20-1. The masses of the products (IA) and (4) could be confirmed via LC-MS. In the reaction 3 no product formation of (6) was observed in LC-MS using the analytical method described in Table 5.4 and GC-MS/FID using the analytical method described in Table 5.5 indicating no enzyme activity when acetophenone was used as substrate. The results of reaction 2 show the increased substrate acceptance of the evolved oxynitrilases for nitroethane (3), whereas no activity had been detected for the wildtype enzyme SEQ ID 606. After initial activity detected for SEQ ID 2, a >25-fold increase in the enzymatic productivity was achieved over the subsequent rounds of evolution, as can be seen when comparing 100 g/L of the less-evolved SEQ ID 2 resulted in lower product formation than 4 g/L of SEQ ID 414.

[0307] The enzyme assays to obtain the results shown in Table 20-1-Reaction 4 were carried out in 96-well deep-well plates (1.1 mL total volume) in 200 μL total reaction volume per well. The reaction mixture contained 0.1 M sodium citrate buffer pH 6.0, 20 vol % iPrOAc and 5.2 g/L (30 mM) 2,2,2-trifluoro-1-phenylethan-1-one (7) and 36.6 g/L (600 mM) nitromethane (2). The reaction plates were heat-sealed and shaken at 200 rpm and 22° C.

[0308] After overnight incubation (˜22 hours), 0.6 mi/well of MeOH was added to the reaction plates. The quenched reaction plates were sealed, mixed well, and centrifuged at 4,000 rpm for 10 min. Subsequently 100 μL/well of the quenched reaction was transferred to a shallow well 96-well plate containing 100 μL MeOH/well. Sample were then analyzed by LC-MS analytics to determine the activity of the enzyme variants using the analytical method described in Table 5.4. The results of reaction 4 show the increased conversion to the product (8) for the evolved oxynitrilases. The most evolved oxynitrilase with the SEQ ID 414 showed highest product formation across all tested substrate combinations.

TABLE 20-1
Peak areas of the products (IA), (4) and (6) depending
on the applied enzyme SEQ ID 2, 156, 414 or 606.

| | Reaction 1 | | | | Reaction 2 | | | |
|---|---|---|---|---|---|---|---|---|
| | (1) + (2) → (IA) | | | | (1) + (3) → (4) | | | |
| | SEQ | SEQ | SEQ | SEQ | SEQ | SEQ | SEQ | SEQ |
| | ID: | ID: | ID: | ID: | ID: | ID: | ID: | ID: |
| | 606 | 2 | 156 | 414 | 606 | 2 | 156 | 414 |
| 0 g/L enzyme | 0.087 | 0.087 | 0.083 | 0.080 | — | — | — | — |
| 0.4 g/L enzyme | 0.088 | 0.121 | 0.206 | 0.231 | — | — | — | — |
| 1.2 g/L enzyme | 0.097 | 0.201 | 0.401 | 0.486 | — | — | — | — |
| 4 g/L enzyme | 0.116 | 0.404 | 0.765 | 0.908 | — | — | — | 0.100 |
| 11 g/L enzyme | 0.136 | 0.604 | 0.948 | 1.333 | — | — | 0.099 | 0.153 |
| 33 g/L enzyme | 0.197 | 0.890 | 1.282 | 1.637 | — | — | 0.154 | 0.175 |
| 100 g/L enzyme | 0.316 | 1.103 | 1.603 | 1.764 | — | 0.075 | 0.184 | 0.215 |
| | Reaction 3 | | | | Reaction 4 | | | |
| | (5) + (2) → (6) | | | | (7) + (2) → (8) | | | |
| | SEQ | SEQ | SEQ | SEQ | SEQ | SEQ | SEQ | SEQ |
| | ID: | ID: | ID: | ID: | ID: | ID: | ID: | ID: |
| | 606 | 2 | 156 | 414 | 606 | 2 | 156 | 414 |
| 0 g/L enzyme | — | — | — | — | 0.541 | 0.525 | 0.527 | 0.525 |
| 0.4 g/L enzyme | — | — | — | — | 0.678 | 0.935 | 2.158 | 5.398 |
| 1.2 g/L enzyme | — | — | — | — | 0.756 | 1.109 | 2.770 | 5.836 |
| 4 g/L enzyme | — | — | — | — | 0.888 | 1.310 | 3.297 | 6.053 |
| 11 g/L enzyme | — | — | — | — | 1.034 | 1.458 | 3.676 | 6.283 |
| 33 g/L enzyme | — | — | — | — | 1.137 | 1.562 | 4.011 | 6.685 |
| 100 g/L enzyme | — | — | — | — | 1.319 | 1.519 | 4.193 | 6.855 |

The application's sequence listing, which the Patent Office published only in electronic form, follows.

SEQUENCE LISTING (640 sequences)

SEQ ID NO: 1 - DNA, 789 bp, synthetic construct
  misc_feature 1..789: note = Description of Artificial Sequence: Synthetic polynucleotide
  source 1..789: mol_type = other DNA
atggttagtgcgcattttattctgatccacagtgtttgccatggcgcctggctgtggtataaactgatcccgttattacagtctgcaggtcataacgttacggcgattgatctttgggctagcgggagtaatcctcaccaactggaacagattggcacatggcgccagtactcagaaccattgttcaccctgatcgaatcgattccggaaggtaagaaagtcattctggtaggagaagcgggtggcggcatcaatattgcactggccgcggagaaatatccggagaaagtgagcgccctcgtctttgtgaacgcacttatgcccgatatcgatcacagtccagcgttcgtggtaaagaaatatagcgaagttttcactgactggaaagattcgatcttcagcaattatacctacggtaacgacacggttaccgcggtggaattgggagatcgtactctggccgagaacatcttctccaattctccgattgaagatgtagaactggcgaaacatcgtgtccgcaaaggctccttttttctgcaagacttggataccctgccgaactttacgtcggaagggtatggttcaattcgtcgtgtgtatgtttacggcgaagaagaccagatctttagccgcgattttcagttatggcaaattaataattataagcctgataaagtgtactgtgtaccgagtgctgaccacaagattatgatcagccgcgtcaacgagctggcccagattctccaagaagttgcaaactctgcgagcgatcttcttgcggtgagt

SEQ ID NO: 2 - protein, 263 aa, synthetic construct
  REGION 1..263: note = Description of Artificial Sequence: Synthetic polypeptide
MVSAHFILIHSVCHGAWLWYKLIPLLQSAGHNVTAIDLWASGSNPHQLEQIGTWRQYSEPLFTLIESIPEGKKVILVGEAGGGINIALAAEKYPEKVSALVFVNALMPDIDHSPAFVVKKYSEVFTDWKDSIFSNYTYGNDTVTAVELGDRTLAENIFSNSPIEDVELAKHRVRKGSFFLQDLDTLPNFTSEGYGSIRRVYVYGEEDQIFSRDFQLWQINNYKPDKVYCVPSADHKIMISRVNELAQILQEVANSASDLLAVS

SEQ ID NO: 3 - DNA, 789 bp, synthetic construct
  misc_feature 1..789: note = Description of Artificial Sequence: Synthetic polynucleotide
  source 1..789: mol_type = other DNA
atggttagtgcgcattttattctgatccacagtgtctgccatggcgcctggctgtggtataaactgatcccgttattacagtctgcaggtcataacgttacggcgattgatcttactgctagcgggagtaatcctcaccaactggaacagattggcacatggcgccagtactcagaaccattgttcaccctgatcgaatcgattccggaaggtaagaaagtcattctggtaggagaagcgggtggcggcatcaatattgcactggccgcggagaaatatccggagaaagtgagcgccctcgtctttgtgaacggtcttatgcccgatatcgatcacagtccagcgttcgtggtaaagaaatatagcgaagttttcactgactggaaagattcgatcttcagcaattatacctacggtaacgacacggttaccgcggtggaattgggagatcgtactctggccgagaacatcttctccaattctccgattgaagatgtagaactggcgaaacatcgtgtccgcaaaggctccttttttctgcaagacttggataccctgccgaactttacgtcggaagggtatggttcaattcgtcgtgtgtatgtttacggcgaagaagaccagatctttagccgcgattttcagttatggcaaattaataattataagcctgataaagtgtactgtgtaccgagtgctgaccacaagattatgatcagccgcgtcaacgagctggcccagattctccaagaagttgcaaactctgcgagcgatcttcttggggtgagt

SEQ ID NO: 4 - protein, 263 aa, synthetic construct
  REGION 1..263: note = Description of Artificial Sequence: Synthetic polypeptide
MVSAHFILIHSVCHGAWLWYKLIPLLQSAGHNVTAIDLTASGSNPHQLEQIGTWRQYSEPLFTLIESIPEGKKVILVGEAGGGINIALAAEKYPEKVSALVFVNGLMPDIDHSPAFVVKKYSEVFTDWKDSIFSNYTYGNDTVTAVELGDRTLAENIFSNSPIEDVELAKHRVRKGSFFLQDLDTLPNFTSEGYGSIRRVYVYGEEDQIFSRDFQLWQINNYKPDKVYCVPSADHKIMISRVNELAQILQEVANSASDLLGVS

SEQ ID NO: 5 - DNA, 789 bp, synthetic construct
  misc_feature 1..789: note = Description of Artificial Sequence: Synthetic polynucleotide
  source 1..789: mol_type = other DNA
atggttagtgcgcattttattctgatccacagtgtctgccatggcgcctggctgtggtataaactgatcccgttattacagtctgcaggtcataacgttacggcgattgatctttgggctagcgggagtaatcctcaccaactggaacagattggcacatggcgccagtactcagaaccattgttcaccctgatcgaatcgattccggaaggtaagaaagtcattctggtaggagaagcgggtggcggcatcaatattgcactggccgcggagaaatatccggagaaagtgagcgccctcgtctttgtgaacggtcttatgcccgatatcgatcacagtccagcgttcgtggtaaagaaatatagcgaagttttcactgactggaaagattcgatcttcagcaattatacctacggtaacgacacggtcaccgcgattgaattgggagatcgtactctggccgagaacatcttctccaattctccgattgaagatgtagaactggcgaaacatcgtgtccgcaaaggctccttttttctgcaagacttggataccctgccgaactttacgtcggaagggtatggttcaattcgtcgtgtgtatgtttacggcgaagaagaccagatctttagccgcgattttcagttatggcaaattaataattataagcctgataaagtgtactgtgtaccgagtgctgaccacaagattatgatcagccgcgtcaacgagctggcccagattctccaagaagttgcaaactctgcgagcgatcttcttggggtgagt

SEQ ID NO: 6 - protein, 263 aa, synthetic construct
  REGION 1..263: note = Description of Artificial Sequence: Synthetic polypeptide
MVSAHFILIHSVCHGAWLWYKLIPLLQSAGHNVTAIDLWASGSNPHQLEQIGTWRQYSEPLFTLIESIPEGKKVILVGEAGGGINIALAAEKYPEKVSALVFVNGLMPDIDHSPAFVVKKYSEVFTDWKDSIFSNYTYGNDTVTAIELGDRTLAENIFSNSPIEDVELAKHRVRKGSFFLQDLDTLPNFTSEGYGSIRRVYVYGEEDQIFSRDFQLWQINNYKPDKVYCVPSADHKIMISRVNELAQILQEVANSASDLLGVS

SEQ ID NO: 7 - DNA, 789 bp, synthetic construct
  misc_feature 1..789: note = Description of Artificial Sequence: Synthetic polynucleotide
  source 1..789: mol_type = other DNA
atggttagtgcgcattttattctgatccacagtgtctgccatggcgcctggctgtggtataaactgatcccgttattacagtctgcaggtcataacgttacggcgattgatctttgggctagcgggagtaatcctcaccaactggaacagattggcacatggcgccagtactcagaaccattgttcaccctgatcgaatcgattccggaaggtaagaaagtcattctggtaggagaagcgggtggcggcatcaatattgcactggccgcggagaaatatccggagaaagtgagcgccctcgtctttgtgaacggtcttatgcccgatatcgatcacagtccagcgttcgtggtaaagaaatatagcgaagttttcactgactggaaagattcgatcttcagcaattatacctacggtaacgacacggttaccgcggtggaattgggagatcgtactctggccgagaacatcttctccaattctccgattgaagatgtagaactggcgaaacatcgtgtccgcaaaggctccttttttctgcaagacttggataccctgccgaactttacgtcggaagggtatggttcaattcgtcgtgtgtatgtttacggcgaagaagaccagatctttagccgcgattttcagttatggcaaattaataattataagcctgataaagtgtactgtgtaccgagtgctgaccacaagattatgatcagccgcgtcaacgagctggcccagattctccaagaagttgcaaactctgcgagcgatcttcttgcggtgagt

SEQ ID NO: 8 - protein, 263 aa, synthetic construct
  REGION 1..263: note = Description of Artificial Sequence: Synthetic polypeptide
MVSAHFILIHSVCHGAWLWYKLIPLLQSAGHNVTAIDLWASGSNPHQLEQIGTWRQYSEPLFTLIESIPEGKKVILVGEAGGGINIALAAEKYPEKVSALVFVNGLMPDIDHSPAFVVKKYSEVFTDWKDSIFSNYTYGNDTVTAVELGDRTLAENIFSNSPIEDVELAKHRVRKGSFFLQDLDTLPNFTSEGYGSIRRVYVYGEEDQIFSRDFQLWQINNYKPDKVYCVPSADHKIMISRVNELAQILQEVANSASDLLAVS

SEQ ID NO: 9 - DNA, 789 bp, synthetic construct
  misc_feature 1..789: note = Description of Artificial Sequence: Synthetic polynucleotide
  source 1..789: mol_type = other DNA
atggttagtgcgcattttattctgatccacagtgtctgccatggcgcctggctgtggtataaactgatcccgttattacagtctgcaggtcataacgttacggcgattgatctttgggctagcgggagtaatcctcaccaactggaacagattggcacatggcgccagtactcagaaccattgttcaccctgatcgaatcgattccggaaggtaagaaagtcattctggtaggagaagcgggtggcggcatcaatattgcactggccgcggagaaatatccggagaaagtgagcgccctcgtctttgtgaacgcacttatgcccgatatcgatcacagtccagcgttcgtggtaaagaaatatagcgaagttttcactgactggaaagattcgatcttcagcaattatacctacggtaacgacacgatcaccgcggttgaattgggagatcgtactctggccgagaacatcttctccaattctccgattgaagatgtagaactggcgaaacatcgtgtccgcaaaggctccttttttctgcaagacttggataccctgccgaactttacgtcggaagggtatggttcaattcgtcgtgtgtatgtttacggcgaagaagaccagatctttagccgcgattttcagttatggcaaattaataattataagcctgataaagtgtactgtgtaccgagtgctgaccacaagattatgatcagccgcgtcaacgagctggcccagattctccaagaagttgcaaactctgcgagcgatcttcttgcggtgagt

SEQ ID NO: 10 - protein, 263 aa, synthetic construct
  REGION 1..263: note = Description of Artificial Sequence: Synthetic polypeptide
MVSAHFILIHSVCHGAWLWYKLIPLLQSAGHNVTAIDLWASGSNPHQLEQIGTWRQYSEPLFTLIESIPEGKKVILVGEAGGGINIALAAEKYPEKVSALVFVNALMPDIDHSPAFVVKKYSEVFTDWKDSIFSNYTYGNDTITAVELGDRTLAENIFSNSPIEDVELAKHRVRKGSFFLQDLDTLPNFTSEGYGSIRRVYVYGEEDQIFSRDFQLWQINNYKPDKVYCVPSADHKIMISRVNELAQILQEVANSASDLLAVS

SEQ ID NO: 11 - DNA, 789 bp, synthetic construct
  misc_feature 1..789: note = Description of Artificial Sequence: Synthetic polynucleotide
  source 1..789: mol_type = other DNA
atggttagtgcgcattttattctgatccacagtatctgccatggcgcctggctgtggtataaactgatcccgttattacagtctgcaggtcataacgttacggcgattgatctttgggctagcgggagtaatcctcaccaactggaacagattggcacatggcgccagtactcagaaccattgttcaccctgatcgaatcgattccggaaggtaagaaagtcattctggtaggagaagcgggtggcggcatcaatattgcactggccgcggagaaatatccggagaaagtgagcgctctcgtctttgtgaacggtcttatgcccgatatcgatcacaatccagcgttcgtggtaaagaaatatagcgaagttttcactgactggaaagattcgatcttcagcaattatacctacggtaacgacacggtcaccgcggttgaattgggagatcgtactctggccgagaacatcttctccaattctccgattgaagatgtagaactggcgaaacatcgtgtccgcaaaggctccttttttctgcaagacttggataccctgccgaactttacgtcggaagggtatggttcaattcgtcgtgtgtatgtttacggcgaagaagaccagatctttagccgcgattttcagttatggcaaattaataattataagcctgataaagtgtactgtgtaccgagtgctgaccacaagattatgatcagccgcgtcaacgagctggcccagattctccaagaagttgcaaactctgcgagcgatcttcttgcggtgagt

SEQ ID NO: 12 - protein, 263 aa, synthetic construct
  REGION 1..263: note = Description of Artificial Sequence: Synthetic polypeptide
MVSAHFILIHSICHGAWLWYKLIPLLQSAGHNVTAIDLWASGSNPHQLEQIGTWRQYSEPLFTLIESIPEGKKVILVGEAGGGINIALAAEKYPEKVSALVFVNGLMPDIDHNPAFVVKKYSEVFTDWKDSIFSNYTYGNDTVTAVELGDRTLAENIFSNSPIEDVELAKHRVRKGSFFLQDLDTLPNFTSEGYGSIRRVYVYGEEDQIFSRDFQLWQINNYKPDKVYCVPSADHKIMISRVNELAQILQEVANSASDLLAVS

SEQ ID NO: 13 - DNA, 789 bp, synthetic construct
  misc_feature 1..789: note = Description of Artificial Sequence: Synthetic polynucleotide
  source 1..789: mol_type = other DNA
atggttagtgcgcattttattctgatccacagtgtctgccatggcgcctggctgtggtataaactgatcccgttattacagtctgcaggtcataacgttacggcgattgatcttggggctagcgggagtaatcctcaccaactggaacagattggcacatggcgccagtactcagaaccattgttcaccctgatcgaatcgattccggaaggtaagaaagtcattctggtaggagaagcgggtggcggcatcaatattgcactggccgcggagaaatatccggagaaagtgagcgccctcgtctttgtgaacggtcttatgcccgatatcgatcacagtccagcgttcgtggtaaagaaatatagcgaagttttcactgactggaaagattcgatcttcagcaattatacctacggtaacgacacggtcaccgcggttgaattgggagatcgtactctggccgagaacatcttctccaattctccgattgaagatgtagaactggcgaaacatcgtgtccgcaaaggctccttttttctgcaagacttggataccctgccgaactttacgtcggaagggtatggttcaattcgtcgtgtgtatatttacggcgaagaagaccagatctttagccgcgattttcagttatggcaaattaataattataagcctgataaagtgtactgtgtaccgagtgctgaccacaagattatgatcagccgcgtcaacgagctggcccagattctccaagaagttgcaaactctgcgagcgatcttcctgcggtgagt

SEQ ID NO: 14 - protein, 263 aa, synthetic construct
  REGION 1..263: note = Description of Artificial Sequence: Synthetic polypeptide
MVSAHFILIHSVCHGAWLWYKLIPLLQSAGHNVTAIDLGASGSNPHQLEQIGTWRQYSEPLFTLIESIPEGKKVILVGEAGGGINIALAAEKYPEKVSALVFVNGLMPDIDHSPAFVVKKYSEVFTDWKDSIFSNYTYGNDTVTAVELGDRTLAENIFSNSPIEDVELAKHRVRKGSFFLQDLDTLPNFTSEGYGSIRRVYIYGEEDQIFSRDFQLWQINNYKPDKVYCVPSADHKIMISRVNELAQILQEVANSASDLPAVS

SEQ ID NO: 15 - DNA, 789 bp, synthetic construct
  misc_feature 1..789: note = Description of Artificial Sequence: Synthetic polynucleotide
  source 1..789: mol_type = other DNA
atggttagtgcgcattttattctgatccacagtgtctgccatggcgcctggctgtggtataaactgatcccgttattacagtctgcaggtcataacgttacggcgattgatcttactgctagcgggagtaatcctcaccaactggaacagattggcacatggcgccagtactcagaaccattgttcaccctgatcgaatcgattccggaaggtaagaaagtcattctggtaggagaagcgggtggcggcatcaatattgcactggccgcggagaaatatccggagaaagtgagcgccctcgtctttgtgaacgctcttatgcccgatatcgatcacagtccagcgttcgtggtaaagaaatatagcgaagttttcactgactggaaagattcgatcttcagcaattatacctacggtaacgacacggttaccgcggtggaattgggagatcgtactctggccgagaacatcttctccaattctccgattgaagatgtagaactggcgaaacatcgtgtccgcaaaggctccttttttctgcaagacttggataccctgccgaactttacgtcggaagggtatggttcaattcgtcgtgtgtatgtttacggcgaagaagaccagatctttagccgcgattttcagttatggcaaattaataattataagcctgataaagtgtactgtgtaccgagtgctgaccacaagattatgatcagccgcgtcaacgagctggcccagattctccaagaagttgcaaactctgcgagcgatcttcttgcggtgagt

SEQ ID NO: 16 - protein, 263 aa, synthetic construct
  REGION 1..263: note = Description of Artificial Sequence: Synthetic polypeptide
MVSAHFILIHSVCHGAWLWYKLIPLLQSAGHNVTAIDLTASGSNPHQLEQIGTWRQYSEPLFTLIESIPEGKKVILVGEAGGGINIALAAEKYPEKVSALVFVNALMPDIDHSPAFVVKKYSEVFTDWKDSIFSNYTYGNDTVTAVELGDRTLAENIFSNSPIEDVELAKHRVRKGSFFLQDLDTLPNFTSEGYGSIRRVYVYGEEDQIFSRDFQLWQINNYKPDKVYCVPSADHKIMISRVNELAQILQEVANSASDLLAVS

SEQ ID NO: 17 - DNA, 789 bp, synthetic construct
  misc_feature 1..789: note = Description of Artificial Sequence: Synthetic polynucleotide
  source 1..789: mol_type = other DNA
atggttagtgcgcattttattctgatccacagtatctgccatggcgcctggctgtggtataaactgatcccgttattacagtctgcaggtcataacgttacggcgattgatctttttgctagcgggagtaatcctcaccaactggaacagattggcacatggcgccagtactcagaaccattgttcaccctgatcgaatcgattccggaaggtaagaaagtcattctggtaggagaagcgggtggcggcatcaatattgcactggccgcggagaaatatccggagaaagtgagcgccctcgtctttgtgaacggtcttatgcccgatctcgatcacagtccagcgttcgtggtaaagaaatatagcgaagttttcactgactggaaagattcgatcttcagcaattatacctacggtaacgacacggttaccgcggtggaattgggagatcgtactctggccgagaacatcttctccaattctccgattgaagatgtagaactggcgaaacatcgtgtccgcaaaggctccttttttctgcaagacttggataccctgccgaactttacgtcggaagggtatggttcaattcgtcgtgtgtatatttacggcgaagaagaccagatctttagccgcgattttcagttatggcaaattaataattataagcctgataaagtgtactgtgtaccgagtgctgaccacaagattatgatcagccgcgtcaacgagctggcccagattctccaagaagttgcaaactctgcgagcgatcttcttggggtgagt

SEQ ID NO: 18 - protein, 263 aa, synthetic construct
  REGION 1..263: note = Description of Artificial Sequence: Synthetic polypeptide
MVSAHFILIHSICHGAWLWYKLIPLLQSAGHNVTAIDLFASGSNPHQLEQIGTWRQYSEPLFTLIESIPEGKKVILVGEAGGGINIALAAEKYPEKVSALVFVNGLMPDLDHSPAFVVKKYSEVFTDWKDSIFSNYTYGNDTVTAVELGDRTLAENIFSNSPIEDVELAKHRVRKGSFFLQDLDTLPNFTSEGYGSIRRVYIYGEEDQIFSRDFQLWQINNYKPDKVYCVPSADHKIMISRVNELAQILQEVANSASDLLGVS

SEQ ID NO: 19 - DNA, 789 bp, synthetic construct
  misc_feature 1..789: note = Description of Artificial Sequence: Synthetic polynucleotide
  source 1..789: mol_type = other DNA
atggttagtgcgcattttattctgatccacagtatctgccatggcgcctggctgtggtataaactgatcccgttattacagtctgcaggtcataacgttacggcgattgatcttactgctagcgggagtaatcctcaccaactggaacagattggcacatggcgccagtactcagaaccattgttcaccctgatcgaatcgattccggaaggtaagaaagtcattctggtaggagaagcgggtggcggcatcaatattgcactggccgcggagaaatatccggagaaagtgagcgccctcgtctttgtgaacgcacttatgcccgatatcgatcacagtccagcgttcgtggtaaagaaatatagcgaagttttcactgactggaaagattcgatcttcagcaattatacctacggtaacgacacggttaccgcggtggaattgggagatcgtactctggccgagaacatcttctccaattctccgattgaagatgtagaactggcgaaacatcgtgtccgcaaaggctccttttttctgcaagacttggataccctgccgaactttacgtcggaagggtatggttcaattcgtcgtgtgtatgtttacggcgaagaagaccagatctttagccgcgattttcagttatggcaaattaataattataagcctgataaagtgtactgtgtaccgagtgctgaccacaagattatgatcagccgcgtcaacgagctggcccagattctccaagaagttgcaaactctgcgagcgatcttcttggggtgagt

SEQ ID NO: 20 - protein, 263 aa, synthetic construct
  REGION 1..263: note = Description of Artificial Sequence: Synthetic polypeptide
MVSAHFILIHSICHGAWLWYKLIPLLQSAGHNVTAIDLTASGSNPHQLEQIGTWRQYSEPLFTLIESIPEGKKVILVGEAGGGINIALAAEKYPEKVSALVFVNALMPDIDHSPAFVVKKYSEVFTDWKDSIFSNYTYGNDTVTAVELGDRTLAENIFSNSPIEDVELAKHRVRKGSFFLQDLDTLPNFTSEGYGSIRRVYVYGEEDQIFSRDFQLWQINNYKPDKVYCVPSADHKIMISRVNELAQILQEVANSASDLLGVS

SEQ ID NO: 21 - DNA, 789 bp, synthetic construct
  misc_feature 1..789: note = Description of Artificial Sequence: Synthetic polynucleotide
  source 1..789: mol_type = other DNA
atggttagtgcgcattttattctgatccacagtatctgccatggcgcctggctgtggtataaactgatcccgttattacagtctgcaggtcataacgttacggcgattgatcttactgctagcgggagtaatcctcaccaactggaacagattggcacatggcgccagtactcagaaccattgttcaccctgatcgaatcgattccggaaggtaagaaagtcattctggtaggagaagcgggtggcggcatcaatattgcactggccgcggagaaatatccggagaaagtgagcgccctcgtctttgtgaacggtcttatgcccgatatcgatcacagtccagcgttcgtggtaaagaaatatagcgaagttttcactgactggaaagattcgatcttcagcaattatacctacggtaacgacacggtcaccgcggttgaattgggagatcgtactctggccgagaacatcttctccaattctccgattgaagatgtagaactggcgaaacatcgtgtccgcaaaggctccttttttctgcaagacttggataccctgccgaactttacgtcggaagggtatggttcaattcgtcgtgtgtatatttacggcgaagaagaccagatctttagccgcgattttcagttatggcaaattaataattataagcctgataaagtgtactgtgtaccgagtgctgaccacaagattatgatcagccgcgtcaacgagctggcccagattctccaagaagttgcaaactctgcgagcgatcttcttggggtgagt

SEQ ID NO: 22 - protein, 263 aa, synthetic construct
  REGION 1..263: note = Description of Artificial Sequence: Synthetic polypeptide
MVSAHFILIHSICHGAWLWYKLIPLLQSAGHNVTAIDLTASGSNPHQLEQIGTWRQYSEPLFTLIESIPEGKKVILVGEAGGGINIALAAEKYPEKVSALVFVNGLMPDIDHSPAFVVKKYSEVFTDWKDSIFSNYTYGNDTVTAVELGDRTLAENIFSNSPIEDVELAKHRVRKGSFFLQDLDTLPNFTSEGYGSIRRVYIYGEEDQIFSRDFQLWQINNYKPDKVYCVPSADHKIMISRVNELAQILQEVANSASDLLGVS

SEQ ID NO: 23 - DNA, 789 bp, synthetic construct
  misc_feature 1..789: note = Description of Artificial Sequence: Synthetic polynucleotide
  source 1..789: mol_type = other DNA
atggttagtgcgcattttattctgatccacagtgtctgccatggcgcctggctgtggtataaactgatcccgttattacagtctgcaggtcataacgttacggcgattgatctttgggctagcgggagtaatcctcaccaactggaacagattggcacatggcgccagtactcagaaccattgttcaccctgatcgaatcgattccggaaggtaagaaagtcattctggtaggagaagcgggtggcggcatcaatattgcactggccgcggagaaatatccggagaaagtgagcactctcgtctttgtgaacgcacttatgcccgatatcgatcacagtccagcgttcgtggtaaagaaatatagcgaagttttcactgactggaaagattcgatcttcagcaattatacctacggtaacgacacggtcaccgcggttgaattgggagatcgtactctggccgagaacatcttctccaattctccgattgaagatgtagaactggcgaaacatcgtgtccgcaaaggctccttttttctgcaagacttggataccctgccgaactttacgtcggaagggtatggttcaattcgtcgtgtgtatgtttacggcgaagaagaccagatctttagccgcgattttcagttatggcaaattaataattataagcctgataaagtgtactgtgtaccgagtgctgaccacaagattatgatcagccgcgtcaacgagctggcccagattctccaagaagttgcaaactctgcgagcgatcttcttgcggtgagt

SEQ ID NO: 24 - protein, 263 aa, synthetic construct
  REGION 1..263: note = Description of Artificial Sequence: Synthetic polypeptide
MVSAHFILIHSVCHGAWLWYKLIPLLQSAGHNVTAIDLWASGSNPHQLEQIGTWRQYSEPLFTLIESIPEGKKVILVGEAGGGINIALAAEKYPEKVSTLVFVNALMPDIDHSPAFVVKKYSEVFTDWKDSIFSNYTYGNDTVTAVELGDRTLAENIFSNSPIEDVELAKHRVRKGSFFLQDLDTLPNFTSEGYGSIRRVYVYGEEDQIFSRDFQLWQINNYKPDKVYCVPSADHKIMISRVNELAQILQEVANSASDLLAVS

SEQ ID NO: 25 - DNA, 789 bp, synthetic construct
  misc_feature 1..789: note = Description of Artificial Sequence: Synthetic polynucleotide
  source 1..789: mol_type = other DNA
atggttagtgcgcattttattctgatccacagtgtctgccatggcgcctggctgtggtataaactgatcccgttattacagtctgcaggtcataacgttacggcgattgatctttgggctagcgggagtaatcctcaccaactggaacagattggcacatggcgccagtactcagaaccattgttcaccctgatcgaatcgattccggaaggtaagaaagtcattctggtaggagaagcgggtggcggcatcaatattgcactggccgcggagaaatatccggagaaagtgctggctctcgtctttgtgaacgcacttatgcccgatatcgatcacagtccagcgttcgtggtaaagaaatatagcgaagttttcactgactggaaagattcgatcttcagcaattatacctacggtaacgacacggtcaccgcggttgaattgggagatcgtactctggccgagaacatcttctccaattctccgattgaagatgtagaactggcgaaacatcgtgtccgcaaaggctccttttttctgcaagacttggataccctgccgaactttacgtcggaagggtatggttcaattcgtcgtgtgtatgtttacggcgaagaagaccagatctttagccgcgattttcagttatggcaaattaataattataagcctgataaagtgtactgtgtaccgagtgctgaccacaagattatgatcagccgcgtcaacgagctggcccagattctccaagaagttgcaaactctgcgagcgatcttcttgcggtgagt

SEQ ID NO: 26 - protein, 263 aa, synthetic construct
  REGION 1..263: note = Description of Artificial Sequence: Synthetic polypeptide
MVSAHFILIHSVCHGAWLWYKLIPLLQSAGHNVTAIDLWASGSNPHQLEQIGTWRQYSEPLFTLIESIPEGKKVILVGEAGGGINIALAAEKYPEKVLALVFVNALMPDIDHSPAFVVKKYSEVFTDWKDSIFSNYTYGNDTVTAVELGDRTLAENIFSNSPIEDVELAKHRVRKGSFFLQDLDTLPNFTSEGYGSIRRVYVYGEEDQIFSRDFQLWQINNYKPDKVYCVPSADHKIMISRVNELAQILQEVANSASDLLAVS

SEQ ID NO: 27 - DNA, 789 bp, synthetic construct
  misc_feature 1..789: note = Description of Artificial Sequence: Synthetic polynucleotide
  source 1..789: mol_type = other DNA
atggttagtgcgcattttattctgatccacagtatctgccatggcgcctggctgtggtataaactgatcccgttattacagtctgcaggtcataacgttacggcgattgatctttgggctagcgggagtaatcctcaccaactggaacagattggcacatggcgccagtactcagaaccattgttcaccctgatcgaatcgattccggaaggtaagaaagtcattctggtaggagaagcgggtggcggcatcaatattgcactggccgcggagaaatatccggagaaagtgagcgccctcgtctttgtgaacggtcttatgcccgatatcgatcacagtccagcgttcgtggtaaagaaatatagcgaagttttcactgactggaaagattcgatcttcagcaattatacctacggtaacgacacggttaccgcggtggaattgggagatcgtactctggccgagaacatcttctccaattctccgattgaagatgtagaactggcgaaacatcgtgtccgcaaaggctccttttttctgcaagacttggataccctgccgaactttacgtcggaagggtatggttcaattcgtcgtgtgtatgtttacggcgaagaagaccagatctttagccgcgattttcagttatggcaaattaataattataagcctgataaagtgtactgtgtaccgagtgctgaccacaagattatgatcagccgcgtcaacgagctggcccagattctccaagaagttgcaaactctgcgagcgatcttcttgaggtgagt

SEQ ID NO: 28 - protein, 263 aa, synthetic construct
  REGION 1..263: note = Description of Artificial Sequence: Synthetic polypeptide
MVSAHFILIHSICHGAWLWYKLIPLLQSAGHNVTAIDLWASGSNPHQLEQIGTWRQYSEPLFTLIESIPEGKKVILVGEAGGGINIALAAEKYPEKVSALVFVNGLMPDIDHSPAFVVKKYSEVFTDWKDSIFSNYTYGNDTVTAVELGDRTLAENIFSNSPIEDVELAKHRVRKGSFFLQDLDTLPNFTSEGYGSIRRVYVYGEEDQIFSRDFQLWQINNYKPDKVYCVPSADHKIMISRVNELAQILQEVANSASDLLEVS

SEQ ID NO: 29 - DNA, 789 bp, synthetic construct
  misc_feature 1..789: note = Description of Artificial Sequence: Synthetic polynucleotide
  source 1..789: mol_type = other DNA
atggttagtgcgcattttattctgatccacagtatctgccatggcgcctggctgtggtataaactgatcccgttattacagtctgcaggtcataacgttacggcgattgatctttttgctagcgggagtaatcctcaccaactggaacagattggcacatggcgccagtactcagaaccattgttcaccctgatcgaatcgattccggaaggtaagaaagtcattctggtaggagaagcgggtggcggcatcaatattgcactggccgcggagaaatatccggagaaagtgagcgccctcgtctttgtgaacgcacttatgcccgatatcgatcacagtccagcgttcgtggtaaagaaatatagcgaagttttcactgactggaaagattcgatcttcagcaattatacctacggtaacgacacggttaccgcggtggaattgggagatcgtactctggccgagaacatcttctccaattctccgattgaagatgtagaactggcgaaacatcgtgtccgcaaaggctccttttttctgcaagacttggataccctgccgaactttacgtcggaagggtatggttcaattcgtcgtgtgtatgtttacggcgaagaagaccagatctttagccgcgattttcagttatggcaaattaataattataagcctgataaagtgtactgtgtaccgagtgctgaccacaagattatgatcagccgcgtcaacgagctggcccagattctccaagaagttgcaaactctgcgagcgatcttcttggggtgagt

SEQ ID NO: 30 - protein, 263 aa, synthetic construct
  REGION 1..263: note = Description of Artificial Sequence: Synthetic polypeptide
MVSAHFILIHSICHGAWLWYKLIPLLQSAGHNVTAIDLFASGSNPHQLEQIGTWRQYSEPLFTLIESIPEGKKVILVGEAGGGINIALAAEKYPEKVSALVFVNALMPDIDHSPAFVVKKYSEVFTDWKDSIFSNYTYGNDTVTAVELGDRTLAENIFSNSPIEDVELAKHRVRKGSFFLQDLDTLPNFTSEGYGSIRRVYVYGEEDQIFSRDFQLWQINNYKPDKVYCVPSADHKIMISRVNELAQILQEVANSASDLLGVS

SEQ ID NO: 31 - DNA, 789 bp, synthetic construct
  misc_feature 1..789: note = Description of Artificial Sequence: Synthetic polynucleotide
  source 1..789: mol_type = other DNA
atggttagtgcgcattttattctgatccacagtgtctgccatggcgcctggctgtggtataaactgatcccgttattacagtctgcaggtcataacgttacggcgattgatctttgggctagcgggagtaatcctcaccaactggaacagattggcacatggcgccagtactcagaaccattgttcaccctgatcgaatcgattccggaaggtaagaaagtcattctggtaggagaagcgggtggcggcatcaatattgcactggccgcggagaaatatccggagaaagtgagcgctctcgtctttgtgaacggtcttatgcccgatatcgatcacagtccagcgttcgtggtaaagaaatatagcgaagttttcactgactggaaagattcgatcttcagcaattatacctacggtaacgacacggttaccgcggtggaattgggagatcgtactctggccgagaacatcttctccaattctccgattgaagatgtagaactggcgaaacatcgtgtccgcaaaggctccttttttctgcaagacttggataccctgccgaactttacgtcggaagggtatggttcaattcgtcgtgtgtatatttacggcgaagaagaccagatctttagccgcgattttcagttatggcaaattaataattataagcctgataaagtgtactgtgtaccgagtgctgaccacaagattatgatcagccgcgtcaacgagctggcccagattctccaagaagttgcaaactctgcgagcgatcttcttgcggtgagt

SEQ ID NO: 32 - protein, 263 aa, synthetic construct
  REGION 1..263: note = Description of Artificial Sequence: Synthetic polypeptide
MVSAHFILIHSVCHGAWLWYKLIPLLQSAGHNVTAIDLWASGSNPHQLEQIGTWRQYSEPLFTLIESIPEGKKVILVGEAGGGINIALAAEKYPEKVSALVFVNGLMPDIDHSPAFVVKKYSEVFTDWKDSIFSNYTYGNDTVTAVELGDRTLAENIFSNSPIEDVELAKHRVRKGSFFLQDLDTLPNFTSEGYGSIRRVYIYGEEDQIFSRDFQLWQINNYKPDKVYCVPSADHKIMISRVNELAQILQEVANSASDLLAVS

SEQ ID NO: 33 - DNA, 789 bp, synthetic construct
  misc_feature 1..789: note = Description of Artificial Sequence: Synthetic polynucleotide
  source 1..789: mol_type = other DNA
atggttagtgcgcattttattctgatccacagtgtctgccatggcgcctggctgtggtataaactgatcccgttattacagtctgcaggtcataacgttacggcgattgatctttgggctagcgggagtaatcctcaccaactggaacagattggcacatggcgccagtactcagaaccattgttcaccctgatcgaatcgattccggaaggtaagaaagtcattctggtaggagaagcgggtggcggcatcaatattgcactggccgcggagaaatatccggagaaagtgctggctctcgtctttgtgaacgctcttatgcccgatatcgatcacagtccagcgttcgtggtaaagaaatatagcgaagttttcactgactggaaagattcgatcttcagcaattatacctacggtaacgacacggttaccgcggttgaattgggagatcgtactctggccgagaacatcttctccaattctccgattgaagatgtagaactggcgaaacatcgtgtccgcaaaggctccttttttctgcaagacttggataccctgccgaactttacgtcggaagggtatggttcaattcgtcgtgtgtatatttacggcgaagaagaccagatctttagccgcgattttcagttatggcaaattaataattataagcctgataaagtgtactgtgtaccgagtgctgaccacaagattatgatcagccgcgtcaacgagctggcccagattctccaagaagttgcaaactctgcgagcgatcttcttggggtgagt

SEQ ID NO: 34 - protein, 263 aa, synthetic construct
  REGION 1..263: note = Description of Artificial Sequence: Synthetic polypeptide
MVSAHFILIHSVCHGAWLWYKLIPLLQSAGHNVTAIDLWASGSNPHQLEQIGTWRQYSEPLFTLIESIPEGKKVILVGEAGGGINIALAAEKYPEKVLALVFVNALMPDIDHSPAFVVKKYSEVFTDWKDSIFSNYTYGNDTVTAVELGDRTLAENIFSNSPIEDVELAKHRVRKGSFFLQDLDTLPNFTSEGYGSIRRVYIYGEEDQIFSRDFQLWQINNYKPDKVYCVPSADHKIMISRVNELAQILQEVANSASDLLGVS

SEQ ID NO: 35 - DNA, 789 bp, synthetic construct
  misc_feature 1..789: note = Description of Artificial Sequence: Synthetic polynucleotide
  source 1..789: mol_type = other DNA
atggttagtgcgcattttattctgatccacagtatctgccatggcgcctggctgtggtataaactgatcccgttattacagtctgcaggtcataacgttacggcgattgatcttgttgctagcgggagtaatcctcaccaactggaacagattggcacatggcgccagtactcagaaccattgttcaccctgatcgaatcgattccggaaggtaagaaagtcattctggtaggagaagcgggtggcggcatcaatattgcactggccgcggagaaatatccggagaaagtgagcgccctcgtctttgtgaacggtcttatgcccgatatcgatcacagtccagcgttcgtggtaaagaaatatagcgaagttttcactgactggaaagattcgatcttcagcaattatacctacggtaacgacacggttaccgcggttgaattgggagatcgtactctggccgagaacatcttctccaattctccgattgaagatgtagaactggcgaaacatcgtgtccgcaaaggctccttttttctgcaagacttggataccctgccgaactttacgtcggaagggtatggttcaattcgtcgtgtgtatgtttacggcgaagaagaccagatctttagccgcgattttcagttatggcaaattaataattataagcctgataaagtgtactgtgtaccgagtgctgaccacaagattatgatcagccgcgtcaacgagctggcccagattctccaagaagttgcaaactctgcgagcgatcttcttgcggtgagt

SEQ ID NO: 36 - protein, 263 aa, synthetic construct
  REGION 1..263: note = Description of Artificial Sequence: Synthetic polypeptide
MVSAHFILIHSICHGAWLWYKLIPLLQSAGHNVTAIDLVASGSNPHQLEQIGTWRQYSEPLFTLIESIPEGKKVILVGEAGGGINIALAAEKYPEKVSALVFVNGLMPDIDHSPAFVVKKYSEVFTDWKDSIFSNYTYGNDTVTAVELGDRTLAENIFSNSPIEDVELAKHRVRKGSFFLQDLDTLPNFTSEGYGSIRRVYVYGEEDQIFSRDFQLWQINNYKPDKVYCVPSADHKIMISRVNELAQILQEVANSASDLLAVS

SEQ ID NO: 37 - DNA, 789 bp, synthetic construct
  misc_feature 1..789: note = Description of Artificial Sequence: Synthetic polynucleotide
  source 1..789: mol_type = other DNA
atggttagtgcgcattttattctgatccacagtgtctgccatggcgcctggctgtggtataaactgatcccgttattacagtctgcaggtcataacgttacggcgattgatcttggggctagcgggagtaatcctcaccaactggaacagattggcacatggcgccagtactcagaaccattgttcaccctgatcgaatcgattccggaaggtaagaaagtcattctggtaggagaagcgggtggcggcatcaatattgcactggccgcggagaaatatccggagaaagtgagcgccctcgtctttgtgaacggtcttatgcccgatatcgatcacagtccagcgttcgtggtaaagaaatatagcgaagttttcactgactggaaagattcgatcttcagcaattatacctacggtaacgacacggtcaccgcgattgaattgggagatcgtactctggccgagaacatcttctccaattctccgattgaagatgtagaactggcgaaacatcgtgtccgcaaaggctccttttttctgcaagacttggataccctgccgaactttacgtcggaagggtatggttcaattcgtcgtgtgtatgtttacggcgaagaagaccagatctttagccgcgattttcagttatggcaaattaataattataagcctgataaagtgtactgtgtaccgagtgctgaccacaagattatgatcagccgcgtcaacgagctggcccagattctccaagaagttgcaaactctgcgagcgatcttcttgcggtgagt

SEQ ID NO: 38 - protein, 263 aa, synthetic construct
  REGION 1..263: note = Description of Artificial Sequence: Synthetic polypeptide
MVSAHFILIHSVCHGAWLWYKLIPLLQSAGHNVTAIDLGASGSNPHQLEQIGTWRQYSEPLFTLIESIPEGKKVILVGEAGGGINIALAAEKYPEKVSALVFVNGLMPDIDHSPAFVVKKYSEVFTDWKDSIFSNYTYGNDTVTAIELGDRTLAENIFSNSPIEDVELAKHRVRKGSFFLQDLDTLPNFTSEGYGSIRRVYVYGEEDQIFSRDFQLWQINNYKPDKVYCVPSADHKIMISRVNELAQILQEVANSASDLLAVS

SEQ ID NO: 39 - DNA, 789 bp, synthetic construct
  misc_feature 1..789: note = Description of Artificial Sequence: Synthetic polynucleotide
  source 1..789: mol_type = other DNA
atggttagtgcgcattttattctgatccacagtgtctgccatggcgcctggctgtggtataaactgatcccgttattacagtctgcaggtcataacgttacggcgattgatctttttgctagcgggagtaatcctcaccaactggaacagattggcacatggcgccagtactcagaaccattgttcaccctgatcgaatcgattccggaaggtaagaaagtcattctggtaggagaagcgggtggcggcatcaatattgcactggccgcggagaaatatccggagaaaatgagcgctctcgtctttgtgaacgcacttatgcccgatatcgatcacagtccagcgttcgtggtaaagaaatatagcgaagttttcactgactggaaagattcgatcttcagcaattatacctacggtaacgacacggtcaccgcggttgaattgggagatcgtactctggccgagaacatcttctccaattctccgattgaagatgtagaactggcgaaacatcgtgtccgcaaaggctccttttttctgcaagacttggataccctgccgaactttacgtcggaagggtatggttcaattcgtcgtgtgtatgtttacggcgaagaagaccagatctttagccgcgattttcagttatggcaaattaataattataagcctgataaagtgtactgtgtaccgagtgctgaccacaagattatgatcagccgcgtcaacgagctggcccagattctccaagaagttgcaaactctgcgagcgatcttcttgcggtgagt

SEQ ID NO: 40 - protein, 263 aa, synthetic construct
  REGION 1..263: note = Description of Artificial Sequence: Synthetic polypeptide
MVSAHFILIHSVCHGAWLWYKLIPLLQSAGHNVTAIDLFASGSNPHQLEQIGTWRQYSEPLFTLIESIPEGKKVILVGEAGGGINIALAAEKYPEKMSALVFVNALMPDIDHSPAFVVKKYSEVFTDWKDSIFSNYTYGNDTVTAVELGDRTLAENIFSNSPIEDVELAKHRVRKGSFFLQDLDTLPNFTSEGYGSIRRVYVYGEEDQIFSRDFQLWQINNYKPDKVYCVPSADHKIMISRVNELAQILQEVANSASDLLAVS

SEQ ID NO: 41 - DNA, 789 bp, synthetic construct
  misc_feature 1..789: note = Description of Artificial Sequence: Synthetic polynucleotide
  source 1..789: mol_type = other DNA
atggttagtgcgcattttattctgatccacagtgtctgccatggcgcctggctgtggtataaactgatcccgttattacagtctgcaggtcataacgttacggcgattgatctttgggctagcgggagtaatcctcaccaactggaacagattggcacatggcgccagtactcagaaccattgttcaccctgatcgaatcgattccggaaggtaagaaagtcattctggtaggagaagcgggtggcggcatcaatattgcactggccgcggagaaatatccggagaaagtgagcgccctcgtctttgtgaacgcacttatgcccgatatcgatcacagtccagcgttcgtggtaaagaaatatagcgaagttttcactgactggaaagattcgatcttcagcaattatacctacggtaacgacacggttaccgcggtggaattgggagatcgtactctggccgagaacatcttctccaattctccgattgaagatgtagaactggcgaaacatcgtgtccgcaaaggctccttttttctgcaagacttggataccctgccgaactttacgtcggaagggtatggttcaattcgtcgtgtgtatgtttacggcgaagaagaccagatctttagccgcgattttcagttatggcaaattaataattataagcctgataaagtgtactgtgtaccgagtgctgaccacaagattatgatcagccgcgtcaacgagctggcccagattctccaagaagttgcaaactctgcgagcgatcttcttggggtgagt

SEQ ID NO: 42 - protein, 263 aa, synthetic construct
  REGION 1..263: note = Description of Artificial Sequence: Synthetic polypeptide
MVSAHFILIHSVCHGAWLWYKLIPLLQSAGHNVTAIDLWASGSNPHQLEQIGTWRQYSEPLFTLIESIPEGKKVILVGEAGGGINIALAAEKYPEKVSALVFVNALMPDIDHSPAFVVKKYSEVFTDWKDSIFSNYTYGNDTVTAVELGDRTLAENIFSNSPIEDVELAKHRVRKGSFFLQDLDTLPNFTSEGYGSIRRVYVYGEEDQIFSRDFQLWQINNYKPDKVYCVPSADHKIMISRVNELAQILQEVANSASDLLGVS

SEQ ID NO: 43 - DNA, 789 bp, synthetic construct
  misc_feature 1..789: note = Description of Artificial Sequence: Synthetic polynucleotide
  source 1..789: mol_type = other DNA
atggttagtgcgcattttattctgatccacagtgtttgccatggcgcctggctgtggtataaactgatcccgttattacagtctgcaggtcataacgttacggcgattgatcttactgctagcgggagtaatcctcaccaactggaacagattggcacatggcgccagtactcagaaccattgttcaccctgatcgaatcgattccggaaggtaagaaagtcattctggtaggagaagcgggtggcggcatcaatattgcactggccgcggagaaatatccggagaaagtgagcgccctcgtctttgtgaacgcacttatgcccgatatcgatcacagtccagcgttcgtggtaaagaaatatagcgaagttttcactgactggaaagattcgatcttcagcaattatacctacggtaacgacacggttaccgcggtggaattgggagatcgtactctggccgagaacatcttctccaattctccgattgaagatgtagaactggcgaaacatcgtgtccgcaaaggctccttttttctgcaagacttggataccctgccgaactttacgtcggaagggtatggttcaattcgtcgtgtgtatgtttacggcgaagaagaccagatctttagccgcgattttcagttatggcaaattaataattataagcctgataaagtgtactgtgtaccgagtgctgaccacaagattatgatcagccgcgtcaacgagctggcccagattctccaagaagttgcaaactctgcgagcgatcttcttggggtgagt

SEQ ID NO: 44 - protein, 263 aa, synthetic construct
  REGION 1..263: note = Description of Artificial Sequence: Synthetic polypeptide
MVSAHFILIHSVCHGAWLWYKLIPLLQSAGHNVTAIDLTASGSNPHQLEQIGTWRQYSEPLFTLIESIPEGKKVILVGEAGGGINIALAAEKYPEKVSALVFVNALMPDIDHSPAFVVKKYSEVFTDWKDSIFSNYTYGNDTVTAVELGDRTLAENIFSNSPIEDVELAKHRVRKGSFFLQDLDTLPNFTSEGYGSIRRVYVYGEEDQIFSRDFQLWQINNYKPDKVYCVPSADHKIMISRVNELAQILQEVANSASDLLGVS

SEQ ID NO: 45 - DNA, 789 bp, synthetic construct
  misc_feature 1..789: note = Description of Artificial Sequence: Synthetic polynucleotide
  source 1..789: mol_type = other DNA
atggttagtgcgcattttattctgatccacagtatctgccatggcgcctggctgtggtataaactgatcccgttattacagtctgcaggtcataacgttacggcgattgatcttactgctagcgggagtaatcctcaccaactggaacagattggcacatggcgccagtactcagaaccattgttcaccctgatcgaatcgattccggaaggtaagaaagtcattctggtaggagaagcgggtggcggcatcaatattgcactggccgcggagaaatatccggagaaagtgagcgccctcgtctttgtgaacggtcttatgcccgatatcgatcacagtccagcgttcgtggtaaagaaatatagcgaagttttcactgactggaaagattcgatcttcagcaattatacctacggtaacgacacggtcaccgcggttgaattgggagatcgtactctggccgagaacatcttctccaattctccgattgaagatgtagaactggcgaaacatcgtgtccgcaaaggctccttttttctgcaagacttggataccctgccgaactttacgtcggaagggtatggttcaattcgtcgtgtgtatgtttacggcgaagaagaccagatctttagccgcgattttcagttatggcaaattaataattataagcctgataaagtgtactgtgtaccgagtgctgaccacaagattatgatcagccgcgtcaacgagctggcccagattctccaagaagttgcaaactctgcgagcgatcttcttgcggtgagt

SEQ ID NO: 46 - protein, 263 aa, synthetic construct
  REGION 1..263: note = Description of Artificial Sequence: Synthetic polypeptide
MVSAHFILIHSICHGAWLWYKLIPLLQSAGHNVTAIDLTASGSNPHQLEQIGTWRQYSEPLFTLIESIPEGKKVILVGEAGGGINIALAAEKYPEKVSALVFVNGLMPDIDHSPAFVVKKYSEVFTDWKDSIFSNYTYGNDTVTAVELGDRTLAENIFSNSPIEDVELAKHRVRKGSFFLQDLDTLPNFTSEGYGSIRRVYVYGEEDQIFSRDFQLWQINNYKPDKVYCVPSADHKIMISRVNELAQILQEVANSASDLLAVS

SEQ ID NO: 47 - DNA, 789 bp, synthetic construct
  misc_feature 1..789: note = Description of Artificial Sequence: Synthetic polynucleotide
  source 1..789: mol_type = other DNA
atggttagtgcgcattttattctgatccacagtgtctgccatggcgcctggctgtggtataaactgatcccgttattacagtctgcaggtcataacgttacggcgattgatctttttgctagcgggagtaatcctcaccaactggaacagattggcacatggcgccagtactcagaaccattgttcaccctgatcgaatcgattccggaaggtaagaaagtcattctggtaggagaagcgggtggcggcatcaatattgcactggccgcggagaaatatccggagaaagtgagcgctctcgtctttgtgaacggtcttatgcccgatatcgatcacagtccagcgttcgtggtaaagaaatatagcgaagttttcactgactggaaagattcgatcttcagcaattatacctacggtaacgacacggtcaccgcggttgaattgggagatcgtactctggccgagaacatcttctccaattctccgattgaagatgtagaactggcgaaacatcgtgtccgcaaaggctccttttttctgcaagacttggataccctgccgaactttacgtcggaagggtatggttcaattcgtcgtgtgtatgtttacggcgaagaagaccagatctttagccgcgattttcagttatggcaaattaataattataagcctgataaagtgtactgtgtaccgagtgctgaccacaagattatgatcagccgcgtcaacgagctggcccagattctccaagaagttgcaaactctgcgagcgatcttcttgcggtgagt

SEQ ID NO: 48 - protein, 263 aa, synthetic construct
  REGION 1..263: note = Description of Artificial Sequence: Synthetic polypeptide
MVSAHFILIHSVCHGAWLWYKLIPLLQSAGHNVTAIDLFASGSNPHQLEQIGTWRQYSEPLFTLIESIPEGKKVILVGEAGGGINIALAAEKYPEKVSALVFVNGLMPDIDHSPAFVVKKYSEVFTDWKDSIFSNYTYGNDTVTAVELGDRTLAENIFSNSPIEDVELAKHRVRKGSFFLQDLDTLPNFTSEGYGSIRRVYVYGEEDQIFSRDFQLWQINNYKPDKVYCVPSADHKIMISRVNELAQILQEVANSASDLLAVS

SEQ ID NO: 49 - DNA, 789 bp, synthetic construct
  misc_feature 1..789: note = Description of Artificial Sequence: Synthetic polynucleotide
  source 1..789: mol_type = other DNA
atggttagtgcgcattttattctgatccacagtgtctgccatggcgcctggctgtggtataaactgatcccgttattacagtctgcaggtcataacgttacggcgattgatctttgggctagcgggagtaatcctcaccaactggaacagattggcacatggcgccagtactcagaaccattgttcaccctgatcgaatcgattccggaaggtaagaaagtcattctggtaggagaagcgggtggcggcatcaatattgcactggccgcggagaaatatccggagaaagtgagcgccctcgtctttgtgaacgcacttatgcccgatatcgatcacagtccagcgttcgtggtaaagaaatatagcgaagttttcactgactggaaagattcgatcttcagcaattatacctacggtaacgacacggttaccgcggtggaattgggagatcgtactctggccgagaacatcttctccaattctccgattgaagatgtagaactggcgaaacatcgtgtccgcaaaggctccttttttctgcaagacttggataccctgccgaactttacgtcggaagggtatggttcaattcgtcgtgtgtatgtttacggcgaagaagaccagatctttagccgcgattttcagttatggcaaattaataattataagcctgataaagtgtactgtgtaccgagtgctgaccacaagattatgatcagccgcgtcaacgagctggcccagattctccaagaagttgcaaactctgcgagcgatcttcctggggtgagt

SEQ ID NO: 50 - protein, 263 aa, synthetic construct
  REGION 1..263: note = Description of Artificial Sequence: Synthetic polypeptide
MVSAHFILIHSVCHGAWLWYKLIPLLQSAGHNVTAIDLWASGSNPHQLEQIGTWRQYSEPLFTLIESIPEGKKVILVGEAGGGINIALAAEKYPEKVSALVFVNALMPDIDHSPAFVVKKYSEVFTDWKDSIFSNYTYGNDTVTAVELGDRTLAENIFSNSPIEDVELAKHRVRKGSFFLQDLDTLPNFTSEGYGSIRRVYVYGEEDQIFSRDFQLWQINNYKPDKVYCVPSADHKIMISRVNELAQILQEVANSASDLPGVS

SEQ ID NO: 51 - DNA, 789 bp, synthetic construct
  misc_feature 1..789: note = Description of Artificial Sequence: Synthetic polynucleotide
  source 1..789: mol_type = other DNA
atggttagtgcgcattttattctgatccacagtgtttgccatggcgcctggctgtggtataaactgatcccgttattacagtctgcaggtcataacgttacggcgattgatctttgggctagcgggagtaatcctcaccaactggaacagattggcacatggcgccagtactcagaaccattgttcaccctgatcgaatcgattccggaaggtaagaaagtcattctggtaggagaagcgggtggcggcatcaatattgcactggccgcggagaaatatccggagaaagtgagcgccctcgtctttgtgaacgcacttatgcccgatatcgatcacagtccagcgttcgtggtaaagaaatatagcgaagttttcactgactggaaagattcgatcttcagcaattatacctacggtaacgacacggttaccgcggtggaattgggagatcgtactctggccgagaacatcttctccaattctccgattgaagatgtagaactggcgaaacatcgtgtccgcaaaggctccttttttctgcaagacttggataccctgccgaactttacgtcggaagggtatggttcaattcgtcgtgtgtatgtttacggcgaagaagaccagatctttggtcgcgattttcagttatggcaaattaataattataagcctgataaagtgtactgtgtaccgagtgctgaccacaagattatgatcagccgcgtcaacgagctggcccagattctccaagaagttgcaaactctgcgagcgatcttcttgcggtgagt

SEQ ID NO: 52 - protein, 263 aa, synthetic construct
  REGION 1..263: note = Description of Artificial Sequence: Synthetic polypeptide
MVSAHFILIHSVCHGAWLWYKLIPLLQSAGHNVTAIDLWASGSNPHQLEQIGTWRQYSEPLFTLIESIPEGKKVILVGEAGGGINIALAAEKYPEKVSALVFVNALMPDIDHSPAFVVKKYSEVFTDWKDSIFSNYTYGNDTVTAVELGDRTLAENIFSNSPIEDVELAKHRVRKGSFFLQDLDTLPNFTSEGYGSIRRVYVYGEEDQIFGRDFQLWQINNYKPDKVYCVPSADHKIMISRVNELAQILQEVANSASDLLAVS

SEQ ID NO: 53 - DNA, 789 bp, synthetic construct
  misc_feature 1..789: note = Description of Artificial Sequence: Synthetic polynucleotide
  source 1..789: mol_type = other DNA
atggttagtgcgcattttattctgatccacagtgtctgccatggcgcctggctgtggtataaactgatcccgttattacagtctgcaggtcataacgttacggcgattgatctttttgctagcgggagtaatcctcaccaactggaacagattggcacatggcgccagtactcagaaccattgttcaccctgatcgaatcgattccggaaggtaagaaagtcattctggtaggagaagcgggtggcggcatcaatattgcactggccgcggagaaatatccggagaaagtgagcgctctcgtctttgtgaacggtcttatgcccgatatcgatcacagtccagcgttcgtggtaaagaaatatggcgaagttttcactgactggaaagattcgatcttcagcaattatacctacggtaacgacacggtcaccgcggttgaattgggagatcgtactctagccgagaacatcttctccaattctccgattgaagatgtagaactggcgaaacatcgtgtccgcaaaggctccttttttctgcaagacttggataccctgccgaactttacgtcggaagggtatggttcaattcgtcgtgtgtatgtttacggcgaagaagaccagatctttagccgcgattttcagttatggcaaattaataattataagcctgataaagtgtactgtgtaccgagtgctgaccacaagattatgatcagccgcgtcaacgagctggcccagattctccaagaagttgcaaactctgcgagcgatcttcttgcggtgagt

SEQ ID NO: 54 - protein, 263 aa, synthetic construct
  REGION 1..263: note = Description of Artificial Sequence: Synthetic polypeptide
MVSAHFILIHSVCHGAWLWYKLIPLLQSAGHNVTAIDLFASGSNPHQLEQIGTWRQYSEPLFTLIESIPEGKKVILVGEAGGGINIALAAEKYPEKVSALVFVNGLMPDIDHSPAFVVKKYGEVFTDWKDSIFSNYTYGNDTVTAVELGDRTLAENIFSNSPIEDVELAKHRVRKGSFFLQDLDTLPNFTSEGYGSIRRVYVYGEEDQIFSRDFQLWQINNYKPDKVYCVPSADHKIMISRVNELAQILQEVANSASDLLAVS

SEQ ID NO: 55 - DNA, 789 bp, synthetic construct
  misc_feature 1..789: note = Description of Artificial Sequence: Synthetic polynucleotide
  source 1..789: mol_type = other DNA
atggttagtgcgcattttattctggtccacagtgtcggccatggcgcctggctgtggtataaactgatcccgttattacagtctgcaggtcataacgttacggcgattgatctttttgctagcgggagtaatcctcaccaactggaacagattggcacatggcgccagtactcagaaccattgttcaccctgatcgaatcgattccggaaggtaagaaagtcattctggtaggagaagcgggcggcggcatcaatattgcactggccgcggagaaatatccggagaaagtgagcgctctcgtctttgtgaacggtcttatgcccgatatcgatcacagtccagcgttcgtggtaaagaaatatagcgaagttttcactgactggaaagattcgatcttcagcaattatacctacggtaacgacacggtcaccgcggttgaattgggagatcgtactctggccgagaacatcttctccaattctccgattgaagatgtagaactggcgaaacatcgtgtccgcaaaggctccttttttctgcaagacttggataccctgccgaactttacgtcggaagggtatggttcaattcgtcgtgtgtatgtttacggcgaagaagaccagatctttagccgcgattttcagttatggcaaattaataattataagcctgataaagtgtactgtgtaccgagtgctgaccacaagattatgatcagccgcgtcaacgagctggcccagattctccaagaagttgcaaactctgcgagcgatcttctgggggtgagt

SEQ ID NO: 56 - protein, 263 aa, synthetic construct
  REGION 1..263: note = Description of Artificial Sequence: Synthetic polypeptide
MVSAHFILVHSVGHGAWLWYKLIPLLQSAGHNVTAIDLFASGSNPHQLEQIGTWRQYSEPLFTLIESIPEGKKVILVGEAGGGINIALAAEKYPEKVSALVFVNGLMPDIDHSPAFVVKKYSEVFTDWKDSIFSNYTYGNDTVTAVELGDRTLAENIFSNSPIEDVELAKHRVRKGSFFLQDLDTLPNFTSEGYGSIRRVYVYGEEDQIFSRDFQLWQINNYKPDKVYCVPSADHKIMISRVNELAQILQEVANSASDLLGVS

SEQ ID NO: 57 - DNA, 789 bp, synthetic construct
  misc_feature 1..789: note = Description of Artificial Sequence: Synthetic polynucleotide
  source 1..789: mol_type = other DNA
atggttagtgcgcattttattctgatccacagtgtctgccatggcgcctggctgtggtataaactgatcccgttattacagtctgcaggtcataacgttacggcgattgatctttttgctagcgggagtaatcctcaccaactggaacagattggcacatggcgccagtactcagaaccattgttcaccctgatcgaatcgattccggaaggtaagaaagtcattctggtaggagaagcgggcggcggcatcaatattgcactggccgcggagaaatatccggagaaagtgagcgctctcgtctttgtgaacggtcttatgcccgatatcgatcacagtccagcgttcgtggtaaagaaatatcgcgaagttttcactgactggaaagattcggtcttcagcaattatacctacggtaacgacacggttaccgcggtggaattgggagatcgtactctggccgagaacatcttctccaattctccgattgaagatgtagaactggcgaaacatcgtgtccgcaagggctccttttttctgcaagacttggataccctgccgaactttacgtcggaagggtatggttcaattcgtcgtgtgtatgtttacggcgaagaagaccagatctttggccgcgattttcagttatggcaaattaataattataagcctgataaagtgtactgtgtaccgagtgctgaccacaagattatgatcagccgcgtcaacgagctggcccagattctccaagaagttgcaaactctgcgagcgatcttctgggggtgagt

SEQ ID NO: 58 - protein, 263 aa, synthetic construct
  REGION 1..263: note = Description of Artificial Sequence: Synthetic polypeptide
MVSAHFILIHSVCHGAWLWYKLIPLLQSAGHNVTAIDLFASGSNPHQLEQIGTWRQYSEPLFTLIESIPEGKKVILVGEAGGGINIALAAEKYPEKVSALVFVNGLMPDIDHSPAFVVKKYREVFTDWKDSVFSNYTYGNDTVTAVELGDRTLAENIFSNSPIEDVELAKHRVRKGSFFLQDLDTLPNFTSEGYGSIRRVYVYGEEDQIFGRDFQLWQINNYKPDKVYCVPSADHKIMISRVNELAQILQEVANSASDLLGVS

SEQ ID NO: 59 - DNA, 789 bp, synthetic construct
  misc_feature 1..789: note = Description of Artificial Sequence: Synthetic polynucleotide
  source 1..789: mol_type = other DNA
atggttagtgcgcattttattctgatccacagtgtctgccatggcgcctggctgtggtataaactgatcccgttattacagtctgcaggtcataacgttacggcgattgatctttttgctagcgggagtaatcctcaccaactggaacagattggcacatggcgccagtactcagaaccattgttcaccctgatcgaatcgattccggaaggtaagaaagtcattctggtaggagaagcgggcggcggcatcaatattgcactggccgcggagaaatatccggagaaagtgtcgactctcgtctttgtgaacggtcttatgcccgatatcgatcacagtccagcgttcgtggtaaagaaatatagcgaagttttcactgactggaaagattcgatcttcagcaattatacctacggtaacgacacggtcaccgcggttgaattgggagatcgtactctggccgagaacatcttctccaattctccgattgaagatgtagaactggcgaaacatcgtgtccgccgcggctccttttttctgcaagacttggataccctgccgaactttacgtcggaagggtatggttcaattcgtcgtgtgtatgtctacggcgaagaagaccagatctttggccgcgattttcagttatggcaaattaataattataagcctgataaagtgtactgtgtaccgagtgctgaccacaagattatgatcagccgcgtcaacgagctggcccagattctccaagaagttgcaaactctgcgagcgatcttctgggggtgagt

SEQ ID NO: 60 - protein, 263 aa, synthetic construct
  REGION 1..263: note = Description of Artificial Sequence: Synthetic polypeptide
MVSAHFILIHSVCHGAWLWYKLIPLLQSAGHNVTAIDLFASGSNPHQLEQIGTWRQYSEPLFTLIESIPEGKKVILVGEAGGGINIALAAEKYPEKVSTLVFVNGLMPDIDHSPAFVVKKYSEVFTDWKDSIFSNYTYGNDTVTAVELGDRTLAENIFSNSPIEDVELAKHRVRRGSFFLQDLDTLPNFTSEGYGSIRRVYVYGEEDQIFGRDFQLWQINNYKPDKVYCVPSADHKIMISRVNELAQILQEVANSASDLLGVS

SEQ ID NO: 61 - DNA, 789 bp, synthetic construct
  misc_feature 1..789: note = Description of Artificial Sequence: Synthetic polynucleotide
  source 1..789: mol_type = other DNA
atggttagtgcgcattttattctgatccacagtgtctgccatggcgcctggctgtggtataaactgatcccgttattacagtctgcaggtcataacgttacggcgattgatctttttgctagcgggagtaatcctcaccaactggaacagattggcacatggcgccagtactcagaaccattgttcaccctgatcgaatcgattccggaaggtaagaaagtcattctggtaggagaagcgggcggcggcatcaatattgcactggccgcggagaaatatccggagaaagtgagcgctctcgtctttgtgaacggtcttatgcccgatatcgatcacagtccagcgttcgtggtaaagaaatatagcgaagttttcactgactggaaagattcgatcttcagcaattatacctacggtaacgacacggttaccgcgatggaattgggagatcgtactctggccgagaacatcttctccaattctccgattgaagatgtagaactggcgaaacatcgtgtccgcaagggctccttttttctgcaagacttggataccctgccgaactttacgtcggaagggtatggttcaattcgtcgtgtgtatgtctacggcgaagaagaccagatctttggccgcgattttcagttatggcaaattaataattataagcctgataaagtgtactgtgtaccgagtgctgaccacaagattatgatcagccgcgtcaacgagctggcccagattctccaagaagttgcaaactctgcgagcgatcttctgggggtgagt

SEQ ID NO: 62 - protein, 263 aa, synthetic construct
  REGION 1..263: note = Description of Artificial Sequence: Synthetic polypeptide
MVSAHFILIHSVCHGAWLWYKLIPLLQSAGHNVTAIDLFASGSNPHQLEQIGTWRQYSEPLFTLIESIPEGKKVILVGEAGGGINIALAAEKYPEKVSALVFVNGLMPDIDHSPAFVVKKYSEVFTDWKDSIFSNYTYGNDTVTAMELGDRTLAENIFSNSPIEDVELAKHRVRKGSFFLQDLDTLPNFTSEGYGSIRRVYVYGEEDQIFGRDFQLWQINNYKPDKVYCVPSADHKIMISRVNELAQILQEVANSASDLLGVS

SEQ ID NO: 63 - DNA, 789 bp, synthetic construct
  misc_feature 1..789: note = Description of Artificial Sequence: Synthetic polynucleotide
  source 1..789: mol_type = other DNA
atggttagtgcgcattttattctgatccacagtgtctgccatggcgcctggctgtggtataaactgatcccgttattacagtctgcaggtcataacgttacggcgattgatctttttgctagcgggagtaatcctcaccaactggaacagattggcacatggcgccagtactcagaaccattgttcaccctgatcgaatcgattccggaaggtaagaaagtcattctggtaggagaagcgggcggcggcatcaatattgcactggccgcggagaaatatccggagaaagtgagcgctctcgtctttgtgaacggtcttatgcccgatatcgatcacagtccagcgttcgtggtaaagaaatataccgaagttttcactgactggaaagattcgatcttcagcaattatacctacggtaacgacacggttaccgcggtggaattgggagatcgtactctggccgagaacatcttctccaattctccgattgaagatgtagaactggcgaaacatcgtgtccgcaaaggctccttttttctgcaagacttggataccctgccgaactttacgtcggaagggtatggttcaattcgtcgtgtgtatgtttacggcgaagaagaccagatctttagccgcgattttcagttatggcaaattaataattataagcctgataaagtgtactgtgtaccgagtgctgaccacaagattatgatcagccgcgtcaacgagctggcccagattctccaagaagttgcaaactctgcgagcgatcttctggcggtgagt

SEQ ID NO: 64 - protein, 263 aa, synthetic construct
  REGION 1..263: note = Description of Artificial Sequence: Synthetic polypeptide
MVSAHFILIHSVCHGAWLWYKLIPLLQSAGHNVTAIDLFASGSNPHQLEQIGTWRQYSEPLFTLIESIPEGKKVILVGEAGGGINIALAAEKYPEKVSALVFVNGLMPDIDHSPAFVVKKYTEVFTDWKDSIFSNYTYGNDTVTAVELGDRTLAENIFSNSPIEDVELAKHRVRKGSFFLQDLDTLPNFTSEGYGSIRRVYVYGEEDQIFSRDFQLWQINNYKPDKVYCVPSADHKIMISRVNELAQILQEVANSASDLLAVS

SEQ ID NO: 65 - DNA, 789 bp, synthetic construct
  misc_feature 1..789: note = Description of Artificial Sequence: Synthetic polynucleotide
  source 1..789: mol_type = other DNA
atggttagtgcgcattttattctgatccacagtgtctgccatggcgcctggctgtggtataaactgatcccgttattacagtctgcaggtcataacgttacggcgattgatctttttgctagcgggagtaatcctcaccaactggaacagattggcacatggcgccagtactcagaaccattgttcaccctgatcgaatcgattccggaaggtaagaaagtcattctggtaggagaagcgggcggcggcatcaatattgcactggccgcggagaaatatccggagaaagtgtcggctctcgtctttgtgaacggtcttatgcccgatatcgatcacagtccagcgttcgtggtaaagaaatatggcgaagttttcactgactggaaagattcgatcttcagcaattatacctacggtaacgacacggttaccgcggtggaattgggagatcgtactctggccgagaacatcttctccaattctccgattgaagatgtagaactggcgaaacatcgtgtccgccgcggctccttttttctgcaagacttggataccctgccgaactttacgtcggaagggtatggttcaattcgtcgtgtgtatgtctacggcgaagaagaccagatctttagccgcgattttcagttatggcaaattaataattataagcctgataaagtgtactgtgtaccgagtgctgaccacaagattatgatcagccgcgtcaacgagctggcccagattctccaagaagttgcaaactctgcgagcgatcttctgggggtgagt

SEQ ID NO: 66 - protein, 263 aa, synthetic construct
  REGION 1..263: note = Description of Artificial Sequence: Synthetic polypeptide
MVSAHFILIHSVCHGAWLWYKLIPLLQSAGHNVTAIDLFASGSNPHQLEQIGTWRQYSEPLFTLIESIPEGKKVILVGEAGGGINIALAAEKYPEKVSALVFVNGLMPDIDHSPAFVVKKYGEVFTDWKDSIFSNYTYGNDTVTAVELGDRTLAENIFSNSPIEDVELAKHRVRRGSFFLQDLDTLPNFTSEGYGSIRRVYVYGEEDQIFSRDFQLWQINNYKPDKVYCVPSADHKIMISRVNELAQILQEVANSASDLLGVS

SEQ ID NO: 67 - DNA, 789 bp, synthetic construct
  misc_feature 1..789: note = Description of Artificial Sequence: Synthetic polynucleotide
  source 1..789: mol_type = other DNA
atggttagtgcgcattttattctgatccacagtgtctgccatggcgcctggctgtggtataaactgatcccgttattacagtctgcaggtcataacgttacggcgattgatctttttgctagcgggagtaatcctcaccaactggaacagattggcacatggcgccagtactcagaaccattgttcaccctgatcgaatcgattccggaaggtaagaaagtcattctggtaggagaagcgggcggcggcatcaatattgcactggccgcggagaaatatccggagaaagtgagcgctctcgtctttgtgaacggtcttatgcccgatatcgatcacagtccagcgttcgtggtaaagaaatatagcgaagttttcactgactggaaagattcgatcttcagcaattatacctacggtaacgacacggtcaccgcggttgaattgggagatcgtactctggccgagaacatcttctccaattctccgattgaagatgtagaactggcgaaacatcgtgtccgcaaaggctccttttttctgcaagacttggataccctgccgaactttacgtcggaagggtatggttcaattcgtcgtgtgtatgtctacggcgaagaagaccagatctttggccgcgattttcagttatggcaaattaataattataagcctgataaagtgtactgtgtaccgagtgctgaccacaagattatgatcagccgcgtcaacgagctggcccagattctccaagaagttgcaaactctgcgagcgatcttccggcggtgagt

SEQ ID NO: 68 - protein, 263 aa, synthetic construct
  REGION 1..263: note = Description of Artificial Sequence: Synthetic polypeptide
MVSAHFILIHSVCHGAWLWYKLIPLLQSAGHNVTAIDLFASGSNPHQLEQIGTWRQYSEPLFTLIESIPEGKKVILVGEAGGGINIALAAEKYPEKVSALVFVNGLMPDIDHSPAFVVKKYSEVFTDWKDSIFSNYTYGNDTVTAVELGDRTLAENIFSNSPIEDVELAKHRVRKGSFFLQDLDTLPNFTSEGYGSIRRVYVYGEEDQIFGRDFQLWQINNYKPDKVYCVPSADHKIMISRVNELAQILQEVANSASDLPAVS

SEQ ID NO: 69 - DNA, 789 bp, synthetic construct
  misc_feature 1..789: note = Description of Artificial Sequence: Synthetic polynucleotide
  source 1..789: mol_type = other DNA
atggttagtgcgcattttattctgatccacagtgtctgccatggcgcctggctgtggtataaactgatcccgttattacagtctgcaggtcataacgttacggcgattgatctttttgctagcgggagtaatcctcaccaactggaacagattggcacatggcgccagtactcagaaccattgttcaccctgatcgaatcgattccggaaggtaagaaagtcattctggtaggagaagcgggtggcggcatcaatattgcactggccgcggagaaatatccggagaaagtgagcgctctcgtctttgtgaacggtcttatgcccgatatcgatcacagtccagcgttcgtggtaaagaaatatagcgaagttttcactgactggaaagattcgatcttcagcaattatacctacggtaacgacacggtcaccgcggttgaattgggagatcgtactctggccgagaacatcttctccaattctccgattgaagatgtagaactggcgaaacatcgtgtccgcaaaggctccttttttctgcaagacttggataccctgccgaactttacgtcggaagggtatggttcaattcgtcgtgtgtatgtttacggcgaagaagacatgatctttagccgcgattttcagttatggcaaattaataattataagcctgataaagtgtactgtgtaccgagtgctgaccacaagattatgatcagccgcgtcaacgagctggcccagattctccaagaagttgcaaactctgcgagcgatcttcttgcggtgagt

SEQ ID NO: 70 - protein, 263 aa, synthetic construct
  REGION 1..263: note = Description of Artificial Sequence: Synthetic polypeptide
MVSAHFILIHSVCHGAWLWYKLIPLLQSAGHNVTAIDLFASGSNPHQLEQIGTWRQYSEPLFTLIESIPEGKKVILVGEAGGGINIALAAEKYPEKVSALVFVNGLMPDIDHSPAFVVKKYSEVFTDWKDSIFSNYTYGNDTVTAVELGDRTLAENIFSNSPIEDVELAKHRVRKGSFFLQDLDTLPNFTSEGYGSIRRVYVYGEEDMIFSRDFQLWQINNYKPDKVYCVPSADHKIMISRVNELAQILQEVANSASDLLAVS

SEQ ID NO: 71 - DNA, 789 bp, synthetic construct
  misc_feature 1..789: note = Description of Artificial Sequence: Synthetic polynucleotide
  source 1..789: mol_type = other DNA
atggttagtgcgcattttattctgatccacagtgtctgccatggcgcctggctgtggtataaactgatcccgttattacagtctgcaggtcataacgttacggcgattgatctttttgctagcgggagtaatcctcaccaactggaacagattggcacatggcgccagtactcagaaccattgttcaccctgatcgaatcgattccggaaggtaagaaagtcattctggtaggagaagcgggtggcggcatcaatattgcactggccgcggagaaatatccggagaaagtgagcgctctcgtctttgtgaacggtcttatgcccgatatcgatcacagtccagcgttcgtggtaaagaaatatagcgaagttttcactgactggaaagattcgatcttcagctattatacctacggtaacgacacggtcaccgcggttgaattgggagatcgtactctggccgagaacatcttctccaattctccgattgaagatgtagaactggcgaaacatcgtgtccgcaaaggctccttttttctgcaagacttggataccctgccgaactttacgtcggaagggtatggttcaattcgtcgtgtgtatgtttacggcgaagaagaccagatctttagccgcgattttcagttatggcaaattaataattataagcctgataaagtgtactgtgtaccgagtgctgaccacaagattatgatcagccgcgtcaacgagctggcccagattctccaagaagttgcaaactctgcgagcgatcttcttgcggtgagt

SEQ ID NO: 72 - protein, 263 aa, synthetic construct
  REGION 1..263: note = Description of Artificial Sequence: Synthetic polypeptide
MVSAHFILIHSVCHGAWLWYKLIPLLQSAGHNVTAIDLFASGSNPHQLEQIGTWRQYSEPLFTLIESIPEGKKVILVGEAGGGINIALAAEKYPEKVSALVFVNGLMPDIDHSPAFVVKKYSEVFTDWKDSIFSYYTYGNDTVTAVELGDRTLAENIFSNSPIEDVELAKHRVRKGSFFLQDLDTLPNFTSEGYGSIRRVYVYGEEDQIFSRDFQLWQINNYKPDKVYCVPSADHKIMISRVNELAQILQEVANSASDLLAVS

SEQ ID NO: 73 - DNA, 786 bp, synthetic construct
  misc_feature 1..786: note = Description of Artificial Sequence: Synthetic polynucleotide
  source 1..786: mol_type = other DNA
atggttagtgcgcattttattctgatccacagtgtctgccatggcgcctggctgtggtataaactgatcccgttattacagtctgcaggtcataacgttacggcgattgatctttttgctagcgggagtaatcctcaccaactggaacagattggcacatggcgccagtactcagaaccattgttcaccctgatcgaatcgattccggaaggtaagaaagtcattctggtaggagaagcgggtggcggcatcaatattgcactggccgcggagaaatatccggagaaagtgagcgctctcgtctttgtgaacggtcttatgcccgatatcgatcacagtccagcgttcgtggtaaagaaatatagcgaagttttcactgactggaaagattcgatcttcagcaattatacctacggtaacgacacggtcaccgcggttgaattgggagatcgtactctggagaacatcttctccaattctccgattgaagatgtagaactggcgaaacatcgtgtccgcaaaggctccttttttctgcaagacttggataccctgccgaactttacgtcggaagggtatggttcaattcgtcgtgtgtatgtttacggcgaagaagaccagatctttagccgcgattttcagttatggcaaattaataattataagcctgataaagtgtactgtgtaccgagtgctgaccacaagattatgatcagccgcgtcaacgagctggcccagattctccaagaagttgcaaactctgcgagcgatcttcttgcggtgagt

SEQ ID NO: 74 - protein, 262 aa, synthetic construct
  REGION 1..262: note = Description of Artificial Sequence: Synthetic polypeptide
MVSAHFILIHSVCHGAWLWYKLIPLLQSAGHNVTAIDLFASGSNPHQLEQIGTWRQYSEPLFTLIESIPEGKKVILVGEAGGGINIALAAEKYPEKVSALVFVNGLMPDIDHSPAFVVKKYSEVFTDWKDSIFSNYTYGNDTVTAVELGDRTLENIFSNSPIEDVELAKHRVRKGSFFLQDLDTLPNFTSEGYGSIRRVYVYGEEDQIFSRDFQLWQINNYKPDKVYCVPSADHKIMISRVNELAQILQEVANSASDLLAVS

SEQ ID NO: 75 - DNA, 789 bp, synthetic construct
  misc_feature 1..789: note = Description of Artificial Sequence: Synthetic polynucleotide
  source 1..789: mol_type = other DNA
atggttagtgcgcattttattctgatccacagtgtctgccatggcgcctggctgtggtataaactgatcccgttattacagtctgcaggtcataacgttacggcgattgatctttttgctagcgggagtaatcctcaccaactggaacagattggcacatggcgccagtactcagaaccattgttcaccctgatcgaatcgattccggaaggtaagaaagtcattctggtaggagaagcgggtggcggcatcaatattgcactggccgcggagaaatatccggagaaagtgagcgctctcgtctttgtgaacggtcttatgcccgatatcgatcacagtccagcgttcgtggtaaagaaatatagcgaagttttcactgactggaaagattcgatcttcagcaattatacctacggtaacgacacggtcaccgcggttgaattgggagatcgtactctggccgagaacatcttctccaattctccgattgaagatgtagaactggcgaaacatcgtgtccgcaaaggctccttttttctgcaagacttggataccctgccgaactttacgtcggaagggtatggttcaattcgtcgtgtgtatgtttacggcgaagaagaccagatctttagccgcgattttcagttatggcaaattaataattataagcctgataaagtgtactgtgtaccgagtgctgaccacaagattatgatcagccgcgtccaggagctggcccagattctccaagaagttgcaaactctgcgagcgatcttcttgcggtgagt

SEQ ID NO: 76 - protein, 263 aa, synthetic construct
  REGION 1..263: note = Description of Artificial Sequence: Synthetic polypeptide
MVSAHFILIHSVCHGAWLWYKLIPLLQSAGHNVTAIDLFASGSNPHQLEQIGTWRQYSEPLFTLIESIPEGKKVILVGEAGGGINIALAAEKYPEKVSALVFVNGLMPDIDHSPAFVVKKYSEVFTDWKDSIFSNYTYGNDTVTAVELGDRTLAENIFSNSPIEDVELAKHRVRKGSFFLQDLDTLPNFTSEGYGSIRRVYVYGEEDQIFSRDFQLWQINNYKPDKVYCVPSADHKIMISRVQELAQILQEVANSASDLLAVS

SEQ ID NO: 77 - DNA, 789 bp, synthetic construct
  misc_feature 1..789: note = Description of Artificial Sequence: Synthetic polynucleotide
  source 1..789: mol_type = other DNA
atggttagtgcgcattttattctgatccacagtgtctgccatggcgcctggctgtggtataaactgatcccgttattacagtctgcaggtcataacgttacggcgattgatctttttgctagcgggagtaatcctcaccaactggaacagattggcacatggcgccagtactcagaaccattgttcaccctgatcgaatcgattccggaaggtaagaaagtcattctggtaggagaagcgggtggcggcatcaatattgcactggccgcggagaaatatccggagaaagtgagcgctctcgtctttgtgaacggtcttatgcccgatatcgatcacagtccagcgttcgtggtaaagaaatatagcgaagttttcactgactggaaagattcgatcttcagcaattatacctacggtaacgacacggtcaccgcggttgaattgggagatcgtactctggccgagaacatcttctccaattctccgattgaagatgtagaactggcgaaacatcgtgtccgcaaaggctccttttttctgcaagacttggataccctgccgaactttacgtcggaagggtatggttcaattcgtcgtgtgtatgtttacggcgaagaagaccagatctttagccgcgattttcagttatggcaaattactaattataagcctgataaagtgtactgtgtaccgagtgctgaccacaagattatgatcagccgcgtcaacgagctggcccagattctccaagaagttgcaaactctgcgagcgatcttcttgcggtgagt

SEQ ID NO: 78 - protein, 263 aa, synthetic construct
  REGION 1..263: note = Description of Artificial Sequence: Synthetic polypeptide
MVSAHFILIHSVCHGAWLWYKLIPLLQSAGHNVTAIDLFASGSNPHQLEQIGTWRQYSEPLFTLIESIPEGKKVILVGEAGGGINIALAAEKYPEKVSALVFVNGLMPDIDHSPAFVVKKYSEVFTDWKDSIFSNYTYGNDTVTAVELGDRTLAENIFSNSPIEDVELAKHRVRKGSFFLQDLDTLPNFTSEGYGSIRRVYVYGEEDQIFSRDFQLWQITNYKPDKVYCVPSADHKIMISRVNELAQILQEVANSASDLLAVS

SEQ ID NO: 79 - DNA, 789 bp, synthetic construct
  misc_feature 1..789: note = Description of Artificial Sequence: Synthetic polynucleotide
  source 1..789: mol_type = other DNA
atggttagtgcgcattttattctgatccacagtgtctgccatggcgcctggctgtggtataaactgatcccgttattacagtctgcaggtcataacgttacggcgattgatctttttgctagcgggagtaatcctcaccaactggaacagattggcacatggtgtcagtactcagaaccattgttcaccctgatcgaatcgattccggaaggtaagaaagtcattctggtaggagaagcgggtggcggcatcaatattgcactggccgcggagaaatatccggagaaagtgagcgctctcgtctttgtgaacggtcttatgcccgatatcgatcacagtccagcgttcgtggtaaagaaatatagcgaagttttcactgactggaaagattcgatcttcagcaattatacctacggtaacgacacggtcaccgcggttgaattgggagatcgtactctggccgagaacatcttctccaattctccgattgaagatgtagaactggcgaaacatcgtgtccgcaaaggctccttttttctgcaagacttggataccctgccgaactttacgtcggaagggtatggttcaattcgtcgtgtgtatgtttacggcgaagaagaccagatctttagccgcgattttcagttatggcaaattaataattataagcctgataaagtgtactgtgtaccgagtgctgaccacaagattatgatcagccgcgtcaacgagctggcccagattctccaagaagttgcaaactctgcgagcgatcttcttgcggtgagt

SEQ ID NO: 80 - protein, 263 aa, synthetic construct
  REGION 1..263: note = Description of Artificial Sequence: Synthetic polypeptide
MVSAHFILIHSVCHGAWLWYKLIPLLQSAGHNVTAIDLFASGSNPHQLEQIGTWCQYSEPLFTLIESIPEGKKVILVGEAGGGINIALAAEKYPEKVSALVFVNGLMPDIDHSPAFVVKKYSEVFTDWKDSIFSNYTYGNDTVTAVELGDRTLAENIFSNSPIEDVELAKHRVRKGSFFLQDLDTLPNFTSEGYGSIRRVYVYGEEDQIFSRDFQLWQINNYKPDKVYCVPSADHKIMISRVNELAQILQEVANSASDLLAVS

SEQ ID NO: 81 - DNA, 789 bp, synthetic construct
  misc_feature 1..789: note = Description of Artificial Sequence: Synthetic polynucleotide
  source 1..789: mol_type = other DNA
atggttagtgcgcattttattctgatccacagtgtctgccatggcgcctggctgtggtataaactgatcccgttattacagtctgcaggtcataacgttacggcgattgatctttttgctagcgggagtaatcctcaccaactggaacagattggcacatggcgccagtactcagaaccattgttcaccctgatcgaatcgattccggaaggtaagaaagtcattctggtaggagaagcgggtggcggcatcaatattgcactggccgcggagaaatatccggagaaagtgagcgctctcgtctttgtgaacggtcttatgcccgatatcgatcacagtccagcgttcgtggtaaagaaatatagcgaagttttcactgactggaaagattcgatcttcagcaattatacctacggtaacgacacggtcaccgcggttgaattgggagatcgtactctggccgagaacatcttctccaattctccgattgaagatgtagaactggcgaaagcgcgtgtccgcaaaggctccttttttctgcaagacttggataccctgccgaactttacgtcggaagggtatggttcaattcgtcgtgtgtatgtttacggcgaagaagaccagatctttagccgcgattttcagttatggcaaattaataattataagcctgataaagtgtactgtgtaccgagtgctgaccacaagattatgatcagccgcgtcaacgagctggcccagattctccaagaagttgcaaactctgcgagcgatcttcttgcggtgagt

SEQ ID NO: 82 - protein, 263 aa, synthetic construct
  REGION 1..263: note = Description of Artificial Sequence: Synthetic polypeptide
MVSAHFILIHSVCHGAWLWYKLIPLLQSAGHNVTAIDLFASGSNPHQLEQIGTWRQYSEPLFTLIESIPEGKKVILVGEAGGGINIALAAEKYPEKVSALVFVNGLMPDIDHSPAFVVKKYSEVFTDWKDSIFSNYTYGNDTVTAVELGDRTLAENIFSNSPIEDVELAKARVRKGSFFLQDLDTLPNFTSEGYGSIRRVYVYGEEDQIFSRDFQLWQINNYKPDKVYCVPSADHKIMISRVNELAQILQEVANSASDLLAVS

SEQ ID NO: 83 - DNA, 789 bp, synthetic construct
  misc_feature 1..789: note = Description of Artificial Sequence: Synthetic polynucleotide
  source 1..789: mol_type = other DNA
atggttagtgcgcattttattctgatccacagtgtctgccatggcgcctggctgtggtataaactgatcccgttattacagtctgcaggtcataacgttacggcgattgatctttttgctagcgggagtaatcctcaccaactggaacagattggcacatggcgccagtactcagaaccattgttcaccctgatcgaatcgattccggaaggtaagaaagtcattctggtaggagaagcgggtggcggcatcaatattgcactggccgcggagaaatatccggagaaagtgagcgctctcgtctttgtgaacggtcttatgcccgatatcgatcacagtccagcgttcgtggtaaagaaatatagcgaagttttcactgactggaaagattcgatcttcagcaattatacctacggtaacgacacggtcaccgcggttgaattgggagatcgtactctggccgagaacatcttctccaattctccgattgaagatgtaatgctggcgaaacatcgtgtccgcaaaggctccttttttctgcaagacttggataccctgccgaactttacgtcggaagggtatggttcaattcgtcgtgtgtatgtttacggcgaagaagaccagatctttagccgcgattttcagttatggcaaattaataattataagcctgataaagtgtactgtgtaccgagtgctgaccacaagattatgatcagccgcgtcaacgagctggcccagattctccaagaagttgcaaactctgcgagcgatcttcttgcggtgagt

SEQ ID NO: 84 - protein, 263 aa, synthetic construct
  REGION 1..263: note = Description of Artificial Sequence: Synthetic polypeptide
MVSAHFILIHSVCHGAWLWYKLIPLLQSAGHNVTAIDLFASGSNPHQLEQIGTWRQYSEPLFTLIESIPEGKKVILVGEAGGGINIALAAEKYPEKVSALVFVNGLMPDIDHSPAFVVKKYSEVFTDWKDSIFSNYTYGNDTVTAVELGDRTLAENIFSNSPIEDVMLAKHRVRKGSFFLQDLDTLPNFTSEGYGSIRRVYVYGEEDQIFSRDFQLWQINNYKPDKVYCVPSADHKIMISRVNELAQILQEVANSASDLLAVS

SEQ ID NO: 85 - DNA, 789 bp, synthetic construct
  misc_feature 1..789: note = Description of Artificial Sequence: Synthetic polynucleotide
  source 1..789: mol_type = other DNA
atggttagtgcgcattttattctgatccacagtgtctgccatggcgcctggctgtggtataaactgatcccgttattacagtctgcaggtcataacgttacggcgattgatctttttgctagcgggagtaatcctcaccaactggaacagattggcacatggcgccagtactcagaaccattgttcaccctgatcgaatcgattccggaaggtaagaaagtcattctggtaggagaagcgggtggcggcatcaatattgcactggccgcggagaaatatccggagaaagtgagcgctctcgtctttgtgaacggtcttatgcccgatatcgggcacagtccagcgttcgtggtaaagaaatatagcgaagttttcactgactggaaagattcgatcttcagcaattatacctacggtaacgacacggtcaccgcggttgaattgggagatcgtactctggccgagaacatcttctccaattctccgattgaagatgtagaactggcgaaacatcgtgtccgcaaaggctccttttttctgcaagacttggataccctgccgaactttacgtcggaagggtatggttcaattcgtcgtgtgtatgtttacggcgaagaagaccagatctttagccgcgattttcagttatggcaaattaataattataagcctgataaagtgtactgtgtaccgagtgctgaccacaagattatgatcagccgcgtcaacgagctggcccagattctccaagaagttgcaaactctgcgagcgatcttcttgcggtgagt

SEQ ID NO: 86 - protein, 263 aa, synthetic construct
  REGION 1..263: note = Description of Artificial Sequence: Synthetic polypeptide
MVSAHFILIHSVCHGAWLWYKLIPLLQSAGHNVTAIDLFASGSNPHQLEQIGTWRQYSEPLFTLIESIPEGKKVILVGEAGGGINIALAAEKYPEKVSALVFVNGLMPDIGHSPAFVVKKYSEVFTDWKDSIFSNYTYGNDTVTAVELGDRTLAENIFSNSPIEDVELAKHRVRKGSFFLQDLDTLPNFTSEGYGSIRRVYVYGEEDQIFSRDFQLWQINNYKPDKVYCVPSADHKIMISRVNELAQILQEVANSASDLLAVS

SEQ ID NO: 87 - DNA, 789 bp, synthetic construct
  misc_feature 1..789: note = Description of Artificial Sequence: Synthetic polynucleotide
  source 1..789: mol_type = other DNA
atggttagtgcgcattttattctgatccacagtgtctgccatggcgcctggctgtggtataaactgatcccgttattacagtctgcaggtcataacgttacggcgattgatctttttgctagcgggagtaatcctcaccaactggaacagattggcacatggcgccagtactcagaaccattgttcaccctgatcgaatcgattccggaaggtaagaaagtcattctggtaggagaagcgggtggcggcatcaatattgcactggccgcggagaaatatccggagaaagtgagcgctctcgtctttgtgaacggtcttatgcccgatatcgatcacagtccagcgttcgtggtaaagaaatatagcgaagttttcactgactggaaagattcgatcttcagcaattatacctacggtaacgacacggtcaccgcggttgaattgggagatcgtactctggccgagaacatcttctccaattctccgattgaagatgtagaactggcgaaacatcgtgtccgcaaaggctccttttttctgcaagacttggataccctgccgaactttacgtcggaagggtatggttcaattcgtcgtgtgtatgtttacggcgaagaagaccagatctttagccgcgattttcagttatggcaaattaataattataagcctgataaagtgtactgtgtaccgagtgctgaccacaagattatgatcagccgcgtcaacgagctggcccagattctccaagaagttgcaaactctgcgagcgatcttcaggcggtgagt

SEQ ID NO: 88 - protein, 263 aa, synthetic construct
  REGION 1..263: note = Description of Artificial Sequence: Synthetic polypeptide
MVSAHFILIHSVCHGAWLWYKLIPLLQSAGHNVTAIDLFASGSNPHQLEQIGTWRQYSEPLFTLIESIPEGKKVILVGEAGGGINIALAAEKYPEKVSALVFVNGLMPDIDHSPAFVVKKYSEVFTDWKDSIFSNYTYGNDTVTAVELGDRTLAENIFSNSPIEDVELAKHRVRKGSFFLQDLDTLPNFTSEGYGSIRRVYVYGEEDQIFSRDFQLWQINNYKPDKVYCVPSADHKIMISRVNELAQILQEVANSASDLQAVS

SEQ ID NO: 89 - DNA, 789 bp, synthetic construct
  misc_feature 1..789: note = Description of Artificial Sequence: Synthetic polynucleotide
  source 1..789: mol_type = other DNA
atggttagtgcgcattttattctgatccacagtgtctgccatggcgcctggctgtggtataaactgatcccgttattacagtctgcaggtcataacgttacggcgattgatctttttgctagcgggagtaatcctcaccaactggaacagattggcacatggcgccagtactcagaaccattgttcaccctgatcgaatcgattccggaaggtaagaaagtcattctggtaggagaagcgggtggcggcatcaatattgcactggccgcggagaaatatccggagaaagtgagcgctctcgtctttgtgaacggtcttatgcccgatatcgatcacagtccagcgttcgtggtaaagaaatatagcgaagttttcactgactggaaagattcgatcttcagcaattatacctacggtaacgacacggtcaccgcggttgaattgggagatcgtactctggccgagaacatcttctccgcgtctccgattgaagatgtagaactggcgaaacatcgtgtccgcaaaggctccttttttctgcaagacttggataccctgccgaactttacgtcggaagggtatggttcaattcgtcgtgtgtatgtttacggcgaagaagaccagatctttagccgcgattttcagttatggcaaattaataattataagcctgataaagtgtactgtgtaccgagtgctgaccacaagattatgatcagccgcgtcaacgagctggcccagattctccaagaagttgcaaactctgcgagcgatcttcttgcggtgagt

SEQ ID NO: 90 - protein, 263 aa, synthetic construct
  REGION 1..263: note = Description of Artificial Sequence: Synthetic polypeptide
MVSAHFILIHSVCHGAWLWYKLIPLLQSAGHNVTAIDLFASGSNPHQLEQIGTWRQYSEPLFTLIESIPEGKKVILVGEAGGGINIALAAEKYPEKVSALVFVNGLMPDIDHSPAFVVKKYSEVFTDWKDSIFSNYTYGNDTVTAVELGDRTLAENIFSASPIEDVELAKHRVRKGSFFLQDLDTLPNFTSEGYGSIRRVYVYGEEDQIFSRDFQLWQINNYKPDKVYCVPSADHKIMISRVNELAQILQEVANSASDLLAVS

SEQ ID NO: 91 - DNA, 789 bp, synthetic construct
  misc_feature 1..789: note = Description of Artificial Sequence: Synthetic polynucleotide
  source 1..789: mol_type = other DNA
atggttagtgcgcattttattctgatccacagtgtctgccatggcgcctggctgtggtataaactgatcccgttattacagtctgcaggtcataacgttacggcgattgatctttttgctagcgggagtaatcctcaccaactggaagagattggcacatggcgccagtactcagaaccattgttcaccctgatcgaatcgattccggaaggtaagaaagtcattctggtaggagaagcgggtggcggcatcaatattgcactggccgcggagaaatatccggagaaagtgagcgctctcgtctttgtgaacggtcttatgcccgatatcgatcacagtccagcgttcgtggtaaagaaatatagcgaagttttcactgactggaaagattcgatcttcagcaattatacctacggtaacgacacggtcaccgcggttgaattgggagatcgtactctggccgagaacatcttctccaattctccgattgaagatgtagaactggcgaaacatcgtgtccgcaaaggctccttttttctgcaagacttggataccctgccgaactttacgtcggaagggtatggttcaattcgtcgtgtgtatgtttacggcgaagaagaccagatctttagccgcgattttcagttatggcaaattaataattataagcctgataaagtgtactgtgtaccgagtgctgaccacaagattatgatcagccgcgtcaacgagctggcccagattctccaagaagttgcaaactctgcgagcgatcttcttgcggtgagt

SEQ ID NO: 92 - protein, 263 aa, synthetic construct
  REGION 1..263: note = Description of Artificial Sequence: Synthetic polypeptide
MVSAHFILIHSVCHGAWLWYKLIPLLQSAGHNVTAIDLFASGSNPHQLEEIGTWRQYSEPLFTLIESIPEGKKVILVGEAGGGINIALAAEKYPEKVSALVFVNGLMPDIDHSPAFVVKKYSEVFTDWKDSIFSNYTYGNDTVTAVELGDRTLAENIFSNSPIEDVELAKHRVRKGSFFLQDLDTLPNFTSEGYGSIRRVYVYGEEDQIFSRDFQLWQINNYKPDKVYCVPSADHKIMISRVNELAQILQEVANSASDLLAVS

SEQ ID NO: 93 - DNA, 789 bp, synthetic construct
  misc_feature 1..789: note = Description of Artificial Sequence: Synthetic polynucleotide
  source 1..789: mol_type = other DNA
atggttagtgcgcattttattctgatccacagtgtctgccatggcgcctggctgtggtataaactgatcccgttattacagtctgcaggtcataacgttacggcgattgatctttttgctagcgggagtaatcctcaccaactggaacagattggcacatggcgccagtactcagaaccattgttcaccctgatcgaatcgattccggaaggtaagaaagtcattctggtaggagaagcgggtggcggcatcaatattgcactggccgcggagaaatatccggagaaagtgagcgctctcgtctttgtgaacggtcttatgcccgatatcgatcacagtccagcgttcgtggtaaagaaatatagcgaagttttcactgactggaaagattcgatcttcagcaattatacctacggtaacgacacggtcaccgcggttgaattgggagatcgtactctggccgagaacatcttctccaattctccgattgaagatgtagaactggcgaaacatcgtgtccgcaaaggctccttttttctgcaagacttggataccctgccgaactttacgtcggaagggtatggttcaattcgtcgtgtgtatgtttacggcgaagaagaccgtatctttagccgcgattttcagttatggcaaattaataattataagcctgataaagtgtactgtgtaccgagtgctgaccacaagattatgatcagccgcgtcaacgagctggcccagattctccaagaagttgcaaactctgcgagcgatcttcttgcggtgagt

SEQ ID NO: 94 - protein, 263 aa, synthetic construct
  REGION 1..263: note = Description of Artificial Sequence: Synthetic polypeptide
MVSAHFILIHSVCHGAWLWYKLIPLLQSAGHNVTAIDLFASGSNPHQLEQIGTWRQYSEPLFTLIESIPEGKKVILVGEAGGGINIALAAEKYPEKVSALVFVNGLMPDIDHSPAFVVKKYSEVFTDWKDSIFSNYTYGNDTVTAVELGDRTLAENIFSNSPIEDVELAKHRVRKGSFFLQDLDTLPNFTSEGYGSIRRVYVYGEEDRIFSRDFQLWQINNYKPDKVYCVPSADHKIMISRVNELAQILQEVANSASDLLAVS

SEQ ID NO: 95 - DNA, 789 bp, synthetic construct
  misc_feature 1..789: note = Description of Artificial Sequence: Synthetic polynucleotide
  source 1..789: mol_type = other DNA
atggttagtgcgcattttattctgatccacagtgtctgccatggcgcctggctgtggtataaactgatcccgttattacagtctgcaggtcataacgttacggcgattgatctttttgctagcgggagtaatcctcaccaactggaacagattggcacatggacgcagtactcagaaccattgttcaccctgatcgaatcgattccggaaggtaagaaagtcattctggtaggagaagcgggtggcggcatcaatattgcactggccgcggagaaatatccggagaaagtgagcgctctcgtctttgtgaacggtcttatgcccgatatcgatcacagtccagcgttcgtggtaaagaaatatagcgaagttttcactgactggaaagattcgatcttcagcaattatacctacggtaacgacacggtcaccgcggttgaattgggagatcgtactctggccgagaacatcttctccaattctccgattgaagatgtagaactggcgaaacatcgtgtccgcaaaggctccttttttctgcaagacttggataccctgccgaactttacgtcggaagggtatggttcaattcgtcgtgtgtatgtttacggcgaagaagaccagatctttagccgcgattttcagttatggcaaattaataattataagcctgataaagtgtactgtgtaccgagtgctgaccacaagattatgatcagccgcgtcaacgagctggcccagattctccaagaagttgcaaactctgcgagcgatcttcttgcggtgagt

SEQ ID NO: 96 - protein, 263 aa, synthetic construct
  REGION 1..263: note = Description of Artificial Sequence: Synthetic polypeptide
MVSAHFILIHSVCHGAWLWYKLIPLLQSAGHNVTAIDLFASGSNPHQLEQIGTWTQYSEPLFTLIESIPEGKKVILVGEAGGGINIALAAEKYPEKVSALVFVNGLMPDIDHSPAFVVKKYSEVFTDWKDSIFSNYTYGNDTVTAVELGDRTLAENIFSNSPIEDVELAKHRVRKGSFFLQDLDTLPNFTSEGYGSIRRVYVYGEEDQIFSRDFQLWQINNYKPDKVYCVPSADHKIMISRVNELAQILQEVANSASDLLAVS

SEQ ID NO: 97 - DNA, 789 bp, synthetic construct
  misc_feature 1..789: note = Description of Artificial Sequence: Synthetic polynucleotide
  source 1..789: mol_type = other DNA
atggttagtgcgcattttattctgatccacagtgtctgccatggcgcctggctgtggtataaactgatcccgttattacagtctgcaggtcataacgttacggcgattgatctttttgctagcgggagtaatcctcactctctggaacagattggcacatggcgccagtactcagaaccattgttcaccctgatcgaatcgattccggaaggtaagaaagtcattctggtaggagaagcgggtggcggcatcaatattgcactggccgcggagaaatatccggagaaagtgagcgctctcgtctttgtgaacggtcttatgcccgatatcgatcacagtccagcgttcgtggtaaagaaatatagcgaagttttcactgactggaaagattcgatcttcagcaattatacctacggtaacgacacggtcaccgcggttgaattgggagatcgtactctggccgagaacatcttctccaattctccgattgaagatgtagaactggcgaaacatcgtgtccgcaaaggctccttttttctgcaagacttggataccctgccgaactttacgtcggaagggtatggttcaattcgtcgtgtgtatgtttacggcgaagaagaccagatctttagccgcgattttcagttatggcaaattaataattataagcctgataaagtgtactgtgtaccgagtgctgaccacaagattatgatcagccgcgtcaacgagctggcccagattctccaagaagttgcaaactctgcgagcgatcttcttgcggtgagt

SEQ ID NO: 98 - protein, 263 aa, synthetic construct
  REGION 1..263: note = Description of Artificial Sequence: Synthetic polypeptide
MVSAHFILIHSVCHGAWLWYKLIPLLQSAGHNVTAIDLFASGSNPHSLEQIGTWRQYSEPLFTLIESIPEGKKVILVGEAGGGINIALAAEKYPEKVSALVFVNGLMPDIDHSPAFVVKKYSEVFTDWKDSIFSNYTYGNDTVTAVELGDRTLAENIFSNSPIEDVELAKHRVRKGSFFLQDLDTLPNFTSEGYGSIRRVYVYGEEDQIFSRDFQLWQINNYKPDKVYCVPSADHKIMISRVNELAQILQEVANSASDLLAVS

SEQ ID NO: 99 - DNA, 789 bp, synthetic construct
  misc_feature 1..789: note = Description of Artificial Sequence: Synthetic polynucleotide
  source 1..789: mol_type = other DNA
atggttagtgcgcattttattctgatccacagtgtctgccatggcgcctggctgtggtataaactgatcccgttattacagtctgcaggtcataacgttacggcgattgatctttttgctagcgggagtaatcctcaccaactggaacagattggcacatggcgccagtactcagaaccattgttcaccctgatcgaatcgattccggaaggtaagaaagtcattctggtaggagaagcgggtggcggcatcaatattgcactggccgcggagaaatatccggagaaagtgagcgctctcgtctttgtgaacggtcttatgcccgatatcgatcacagtccagcgttcgtggtaaagaaatatagcgaagttttcactgactggaaagattcgatcttcagcaattatacctacggtaacgacacggtcaccgcggttgaattgggagatcgtactctggccgagaacatcttctccaattctccgattgaagatgtagaactggcgaaacatcgtgtccgcaaaggctccttttttctgcaagacttggataccctgccgaactttacgtcggaagggtatggttcaattatgcgtgtgtatgtttacggcgaagaagaccagatctttagccgcgattttcagttatggcaaattaataattataagcctgataaagtgtactgtgtaccgagtgctgaccacaagattatgatcagccgcgtcaacgagctggcccagattctccaagaagttgcaaactctgcgagcgatcttcttgcggtgagt

SEQ ID NO: 100 - protein, 263 aa, synthetic construct
  REGION 1..263: note = Description of Artificial Sequence: Synthetic polypeptide
MVSAHFILIHSVCHGAWLWYKLIPLLQSAGHNVTAIDLFASGSNPHQLEQIGTWRQYSEPLFTLIESIPEGKKVILVGEAGGGINIALAAEKYPEKVSALVFVNGLMPDIDHSPAFVVKKYSEVFTDWKDSIFSNYTYGNDTVTAVELGDRTLAENIFSNSPIEDVELAKHRVRKGSFFLQDLDTLPNFTSEGYGSIMRVYVYGEEDQIFSRDFQLWQINNYKPDKVYCVPSADHKIMISRVNELAQILQEVANSASDLLAVS

SEQ ID NO: 101 - DNA, 789 bp, synthetic construct
  misc_feature 1..789: note = Description of Artificial Sequence: Synthetic polynucleotide
  source 1..789: mol_type = other DNA
atggttagtgcgcattttattctgatccacagtgtctgccatggcgcctggctgtggtataaactgatcccgttattacagtctgcaggtcataacgttacggcgattgatctttttgctagcgggagtaatcctcaccaactggaacagattggcacatggcgccagtactcagaaccattgttcaccctgatcgaatcgattccggaaggtaagaaagtcattctggtaggagaagcgggtggcggcatcaatattgcactggccgcggagaaatatccggagaaagtgagcgctctcgtctttgtgaacggtcttatgcccgatatcgatcacagtccagcgttcgtggtaaagaaatatagcgaagttttcactgactggaaagattcgatcttcagcaattatacctacggtaacgacacggtcaccgcggttgaattgggagatcgtactctggccgagaacatcttctccaattctccgattgaagatgtagaactggcgaaacatcgtgtccgcaaaggctccttttttctgcaagacttggataccctgccgaactttacgtcggaagggtatggttcaattcgtcgtgtgtatgtttacggcgaagaagaccagatctttagccgcgattttcagttatggcaaattaataattataagcctgataaagtgtactgtgtaccgagtgctgaccacaagattatgatcagccgcgtcaacgagctggcccagattctccaagaagttgcaaactctgcgagcgataggcttgcggtgagt

SEQ ID NO: 102 - protein, 263 aa, synthetic construct
  REGION 1..263: note = Description of Artificial Sequence: Synthetic polypeptide
MVSAHFILIHSVCHGAWLWYKLIPLLQSAGHNVTAIDLFASGSNPHQLEQIGTWRQYSEPLFTLIESIPEGKKVILVGEAGGGINIALAAEKYPEKVSALVFVNGLMPDIDHSPAFVVKKYSEVFTDWKDSIFSNYTYGNDTVTAVELGDRTLAENIFSNSPIEDVELAKHRVRKGSFFLQDLDTLPNFTSEGYGSIRRVYVYGEEDQIFSRDFQLWQINNYKPDKVYCVPSADHKIMISRVNELAQILQEVANSASDRLAVS

SEQ ID NO: 103 - DNA, 789 bp, synthetic construct
  misc_feature 1..789: note = Description of Artificial Sequence: Synthetic polynucleotide
  source 1..789: mol_type = other DNA
atggttagtgcgcattttattctgatccacagtgtctgccatggcgcctggctgtggtataaactgatcccgttattacagtctgcaggtcataacgttacggcgattgatctttttgctagcgggagtaatcctcaccaactggaacagattggcacatggcgccagtactcagaaccattgttcaccctgatcgaatcgattccggaaggtaagaaagtcattctggtaggagaagcgggtggcggcatcaatattgcactggccgcggagaaatatccggagaaagtgagcgctctcgtctttgtgaacggtcttatgcccgatatcgatcacagtccagcgttcgtggtaaagaaatatagcgaagttttcactgactggaaagattcgatcttcagcaattatacctacggtaacgacacggtcaccgcggttgaattgggagatcgtactctggccgagaacatcttctccaattctccgattgaagatgtagaactggcgaaacatcgtgtccgcaaaggctccttttttctgcaagacttggataccctgccgaactttacgtcggaagggtatggttcaattcgtcgtgtgtatgtttacggcgaagaagaccagatctttagccgcgattttcagttatggcaaattaataattataagcctgataaagtgtactgtgtaccgagtgctgaccacaagattatgatcagccgcgtcaacgagctggcctttattctccaagaagttgcaaactctgcgagcgatcttcttgcggtgagt

SEQ ID NO: 104 - protein, 263 aa, synthetic construct
  REGION 1..263: note = Description of Artificial Sequence: Synthetic polypeptide
MVSAHFILIHSVCHGAWLWYKLIPLLQSAGHNVTAIDLFASGSNPHQLEQIGTWRQYSEPLFTLIESIPEGKKVILVGEAGGGINIALAAEKYPEKVSALVFVNGLMPDIDHSPAFVVKKYSEVFTDWKDSIFSNYTYGNDTVTAVELGDRTLAENIFSNSPIEDVELAKHRVRKGSFFLQDLDTLPNFTSEGYGSIRRVYVYGEEDQIFSRDFQLWQINNYKPDKVYCVPSADHKIMISRVNELAFILQEVANSASDLLAVS

SEQ ID NO: 105 - DNA, 786 bp, synthetic construct
  misc_feature 1..786: note = Description of Artificial Sequence: Synthetic polynucleotide
  source 1..786: mol_type = other DNA
atggttagtgcgcattttattctgatccacagtatctgccatggcgcctggctgtggtataaactgatcccgttattacagtctgcaggtcataacgttacggcgattgatctttttgctagcgggagtaatcctcaccaactggaacagattggcacatggcgccagtactcagaaccattgttcaccctgatcgaatcgattccggaaggtaagaaagtcattctggtaggagaagcgggtggcggcatcaatattgcactggccgcggagaaatatccggagaaagtgagcgctctcgtctttgtgaacggccttatgcccgatatcgatcacagtccagcgttcgtggtaaagaaatatagcgaagttttcactgactggaaagattcgatcttcagcaattatacctacggtaacgacacggtcaccgcggttgaattgggagatcgtactctggagaacatcttctccaattctccgattgaagatgtagaactggcgaaacatcgcgtccgcaaaggctccttttttctgcaagacttggataccctgccgaactttacgtcggaagggtatggttcaattcgtcgtgtgtatgtttacggcgaagaagaccagatctttagccgcgattttcagttatggcaaattaataattataagcctgataaagtgtactgtgtaccgagtgctgaccacaagattatgatcagcaaagtcaacgagctggcccagattctccaagaagttgcaaactctgcgagcgatcttcttgcggtgagt

SEQ ID NO: 106 - protein, 262 aa, synthetic construct
  REGION 1..262: note = Description of Artificial Sequence: Synthetic polypeptide
MVSAHFILIHSICHGAWLWYKLIPLLQSAGHNVTAIDLFASGSNPHQLEQIGTWRQYSEPLFTLIESIPEGKKVILVGEAGGGINIALAAEKYPEKVSALVFVNGLMPDIDHSPAFVVKKYSEVFTDWKDSIFSNYTYGNDTVTAVELGDRTLENIFSNSPIEDVELAKHRVRKGSFFLQDLDTLPNFTSEGYGSIRRVYVYGEEDQIFSRDFQLWQINNYKPDKVYCVPSADHKIMISKVNELAQILQEVANSASDLLAVS

SEQ ID NO: 107 - DNA, 786 bp, synthetic construct
  misc_feature 1..786: note = Description of Artificial Sequence: Synthetic polynucleotide
  source 1..786: mol_type = other DNA
atggttagtgcgcattttattctgatccacagtatctgccatggcgcctggctgtggtataaactgatcccgttattacagtctgcaggtcataacgttacggcgattgatctttttgctagcgggagtaatcctcaccaactggaacagattggcacatggcgccagtactcagaaccattgttcaccctgatcgaatcgattccggaaggtaagaaagtcattctggtaggagaagcgggtggcggcatcaatattgcactggccgcggagaaatatccggagaaagtgagcgctctcgtctttgtgaacggtcttatgcccgatatcgatcacagtccagcgttcgtggtgaagaaatacagcgaagttttcactgactggaaagattcgatcttcagcaattatacctacggtaacgacacggtcaccgcggttgaattgggagatcgtactctggagaacatcttctccaattctccgattgaagatgtagaactggcgaaacatcgtgtccgcaaaggctccttttttgaacaagacttggataccctgccgaactttacgtcggaagggtatggttcaattcgtcgtgtgtatgtttacggcgaagaagaccagatctttagccgcgattttcagttatggcaaattaataattataagcctgataaagtgtactgtgtaccgagtgctgaccacaagattatgatcagccgtgtcaacgagctggcccagattctccaagaagttgcaaactctgcgagcgatcttcttgcggtgagt

SEQ ID NO: 108 - protein, 262 aa, synthetic construct
  REGION 1..262: note = Description of Artificial Sequence: Synthetic polypeptide
MVSAHFILIHSICHGAWLWYKLIPLLQSAGHNVTAIDLFASGSNPHQLEQIGTWRQYSEPLFTLIESIPEGKKVILVGEAGGGINIALAAEKYPEKVSALVFVNGLMPDIDHSPAFVVKKYSEVFTDWKDSIFSNYTYGNDTVTAVELGDRTLENIFSNSPIEDVELAKHRVRKGSFFEQDLDTLPNFTSEGYGSIRRVYVYGEEDQIFSRDFQLWQINNYKPDKVYCVPSADHKIMISRVNELAQILQEVANSASDLLAVS

SEQ ID NO: 109 - DNA, 786 bp, synthetic construct
  misc_feature 1..786: note = Description of Artificial Sequence: Synthetic polynucleotide
  source 1..786: mol_type = other DNA
atggttagtgcgcattttattctgatccacagtatctgccatggcgcctggctgtggtataaactgatcccgttattacagtctgcaggtcataacgttacggcgattgatctttttgctagcgggagtaatcctcaccaactggaacagattggcacatgggaacagtactcagaaccattgttcaccctgatcgaatcgattccggaaggtaagaaagtcattctggtaggagaagcgggtggcggcatcaatattgcactggccgcggagaaatatccggagaaagtgagcgctctcgtctttgtgaacggtcttatgcccgatatcgatcacagtccagcgttcgtggtaaagaaatatagcgaagttttcactgactggaaagattcgatcttcagcaattatacctacggtaacgacacggtcaccgcggttgaattgggagatcgtactctggagaacatcttctccaattctccgattgaagatgtagaactggcgaaacatcgtgtccgcaaaggctccttttttctgcaagacttggataccctgccgaactttacgtcggaagggtatggttcaattcgtcgtgtgtatgtttacggcgaagaagaccagatctttagccgcgattttcagttatggcaaattaataattataagcctgataaagtgtactgtgtaccgagtgctgaccacaagattatgatcagccgcgtcaacgagctggcccagattctccaagaagttgcaaactctgcgagcgatcttcttgcggtgagt

SEQ ID NO: 110 - protein, 262 aa, synthetic construct
  REGION 1..262: note = Description of Artificial Sequence: Synthetic polypeptide
MVSAHFILIHSICHGAWLWYKLIPLLQSAGHNVTAIDLFASGSNPHQLEQIGTWEQYSEPLFTLIESIPEGKKVILVGEAGGGINIALAAEKYPEKVSALVFVNGLMPDIDHSPAFVVKKYSEVFTDWKDSIFSNYTYGNDTVTAVELGDRTLENIFSNSPIEDVELAKHRVRKGSFFLQDLDTLPNFTSEGYGSIRRVYVYGEEDQIFSRDFQLWQINNYKPDKVYCVPSADHKIMISRVNELAQILQEVANSASDLLAVS

SEQ ID NO: 111 - DNA, 786 bp, synthetic construct
  misc_feature 1..786: note = Description of Artificial Sequence: Synthetic polynucleotide
  source 1..786: mol_type = other DNA
atggttagtgcgcattttattctgatccacagtatctgccatggcgcctggctgtggtataaactgatcccgttattacagtctgcaggtcataacgctacggcgattgatctttttgctagcgggagtaatcctcaccaactggaacagattggcacatggcgccagtactcagaaccattgttcaccctgatcgaatcgattccggaaggtaagaaagtcattctggtaggagaagcgggtggcggcatcaatattgcactggccgcggagaaatatccggagaaagtgagcgctctcgtctttgtgaacggtcttatgcccgatatcgatcacagtccagcgttcgtggtgaagaaatacagcgaagttttcactgactggaaagattcgatcttcagcaattatacctacggtaacgacacggtcaccgcggttgaattgggagatcgtactctggagaacatcttctccaattctccgattgaagatgtagaactggcgaaacatctggtccgcaaaggctccttttttctgcaagacttggataccctgccgaactttacgtcggaagggtatggttcaattcgtcgtgtgtatgtttacggcgaagaagaccagatctttagccgcgattttcagttatggcaaattaataattataagcctgataaagtgtactgtgtaccgagtgctgaccacaagattatgatcagccgtgtcaacgagctggcccagattctccaagaagttgcaaactctgcgagcgatcttcttgcggtgagt

SEQ ID NO: 112 - protein, 262 aa, synthetic construct
  REGION 1..262: note = Description of Artificial Sequence: Synthetic polypeptide
MVSAHFILIHSICHGAWLWYKLIPLLQSAGHNATAIDLFASGSNPHQLEQIGTWRQYSEPLFTLIESIPEGKKVILVGEAGGGINIALAAEKYPEKVSALVFVNGLMPDIDHSPAFVVKKYSEVFTDWKDSIFSNYTYGNDTVTAVELGDRTLENIFSNSPIEDVELAKHLVRKGSFFLQDLDTLPNFTSEGYGSIRRVYVYGEEDQIFSRDFQLWQINNYKPDKVYCVPSADHKIMISRVNELAQILQEVANSASDLLAVS

SEQ ID NO: 113 - DNA, 786 bp, synthetic construct
  misc_feature 1..786: note = Description of Artificial Sequence: Synthetic polynucleotide
  source 1..786: mol_type = other DNA
atggttagtgcgcattttattctgatccacagtatctgccatggcgcctggctgtggtataaactgatcccgttattacagtctgcaggtcataacgttacggcgattgatctttttgctagcgggatcgatcctcatcaactggaacagattggcacatggcgccagtactcagaaccattgttcaccctgatcgaatcgattccggaaggtaagaaagtcattctggtaggagaagcgggtggcggcatcaatattgcactggccgcggagaaatatccggagaaagtgagcgctctcgtctttgtgaacggtcttatgcccgatatcgatcacagtccagcgttcgtggtaaagaaatatagcgaagttttcactgactggaaagattcgatcttcagcaattatacctacggtaacgacacggtcaccgcggttgaattgggagatcgtactctggagaacatcttctccaattctccgattgaagatgtagaactggcgaaacatcgtgtccgcaaaggctccttttttctgcaagacttggataccctgccgaactttacgtcggaagggtatggttcaattcgtcgtgtgtatgtttacggcgaagaagaccagatctttagccgcgattttcagttatggcaaattaataattataagcctgataaagtgtactgtgtaccgagtgctgaccacaagattatgatcagccgcgtcaacgagctggcccagattctccaagaagttgcaaactctgcgagcgatcttcttgcggtgtcg

SEQ ID NO: 114 - protein, 262 aa, synthetic construct
  REGION 1..262: note = Description of Artificial Sequence: Synthetic polypeptide
MVSAHFILIHSICHGAWLWYKLIPLLQSAGHNVTAIDLFASGIDPHQLEQIGTWRQYSEPLFTLIESIPEGKKVILVGEAGGGINIALAAEKYPEKVSALVFVNGLMPDIDHSPAFVVKKYSEVFTDWKDSIFSNYTYGNDTVTAVELGDRTLENIFSNSPIEDVELAKHRVRKGSFFLQDLDTLPNFTSEGYGSIRRVYVYGEEDQIFSRDFQLWQINNYKPDKVYCVPSADHKIMISRVNELAQILQEVANSASDLLAVS

SEQ ID NO: 115 - DNA, 786 bp, synthetic construct
  misc_feature 1..786: note = Description of Artificial Sequence: Synthetic polynucleotide
  source 1..786: mol_type = other DNA
atggttagtgcgcattttattctgatccacagtatctgccatggcgcctggctgtggtataaactgatcccgttattacagtctgcaggtcataacgttacggcgattgatctttttgctagcgggagtaatcctcaccaactggaacagattggcacatgggaacagtactcagaaccattgttcaccctgatcgaatcgattccggaaggtaagaaagtcattctggtaggagaagcgggtggcggcatcaatattgcactggccgcggagaaatatccggagaaagtgagcgctctcgtctttgtgaacggtcttatgcccgatatcgatcacagtccagcgttcgtggtaaagaaatatagcgaagttttcactgactggaaagattcgatcttcagcaattatacctacggtaacgacacggtcaccgcggttgaattgggagatcgtactctggagaacatcttctccaattctccgattgaagatgtagaactggcgaaacatctggtccgcaaaggctccttttttctgcaagacttggataccctgccgaactttacgtcggaagggtatggttcaattcgtcgtgtgtatgtttacggcgaagaagaccagatctttagccgcgattttcagttatggcaaattaataattataagcctgataaagtgtactgtgtaccgagtgctgaccacaagattatgatcagccgcgtcaacgagctggcccagattctccaagaagttgcaaactctgcgagcgatcttcttgcggtgagt

SEQ ID NO: 116 - protein, 262 aa, synthetic construct
  REGION 1..262: note = Description of Artificial Sequence: Synthetic polypeptide
MVSAHFILIHSICHGAWLWYKLIPLLQSAGHNVTAIDLFASGSNPHQLEQIGTWEQYSEPLFTLIESIPEGKKVILVGEAGGGINIALAAEKYPEKVSALVFVNGLMPDIDHSPAFVVKKYSEVFTDWKDSIFSNYTYGNDTVTAVELGDRTLENIFSNSPIEDVELAKHLVRKGSFFLQDLDTLPNFTSEGYGSIRRVYVYGEEDQIFSRDFQLWQINNYKPDKVYCVPSADHKIMISRVNELAQILQEVANSASDLLAVS

SEQ ID NO: 117 - DNA, 786 bp, synthetic construct
  misc_feature 1..786: note = Description of Artificial Sequence: Synthetic polynucleotide
  source 1..786: mol_type = other DNA
atggttagtgcgcattttattctgatccacagtatctgccatggcgcctggctgtggtataaactgatcccgttattacagtctgcaggtcataacgctacggcgattgatctttttgctagcgggagtaatcctcaccaactggaacagattggcacatggcgccagtactcagaaccattgttcaccctgatcgaatcgattccggaaggtaagaaagtcattctggtaggagaagcgggtggcggcatcaatattgcactggccgcggagaaatatccggagaaagtgagcgctctcgtctttgtgaacggtcttatgcccgatatcgatcacagtccagcgttcgtggtaaagaaatatagcgaagttttcactgactggaaagattcgatcttcagcaattatacctacggtaacgacacggtcaccgcggttgaattgggagatcgtactctggagaacatcttctccaattctccgattgaagatgtagaactggcgaaacatcgcgtccgcaaaggctccttttttctgcaagacttggataccctgccgaactttacgtcggaagggtatggttcaattcgtcgtgtgtatgtttacggcgaagaagaccagatctttagccgcgattttcagttatggcaaattaataattataagcctgataaagtgtactgtgtaccgagtgctgaccacaagattatgatcagccgcgtcaacgagctggcccagattctccaagaagttgcaaactctgcgagcgatcttcttgcggtgagt

SEQ ID NO: 118 - protein, 262 aa, synthetic construct
  REGION 1..262: note = Description of Artificial Sequence: Synthetic polypeptide
MVSAHFILIHSICHGAWLWYKLIPLLQSAGHNATAIDLFASGSNPHQLEQIGTWRQYSEPLFTLIESIPEGKKVILVGEAGGGINIALAAEKYPEKVSALVFVNGLMPDIDHSPAFVVKKYSEVFTDWKDSIFSNYTYGNDTVTAVELGDRTLENIFSNSPIEDVELAKHRVRKGSFFLQDLDTLPNFTSEGYGSIRRVYVYGEEDQIFSRDFQLWQINNYKPDKVYCVPSADHKIMISRVNELAQILQEVANSASDLLAVS

SEQ ID NO: 119 - DNA, 786 bp, synthetic construct
  misc_feature 1..786: note = Description of Artificial Sequence: Synthetic polynucleotide
  source 1..786: mol_type = other DNA
atggttagtgcgcattttattctgatccacagtatctgccatggcgcctggctgtggtataaactgatcccgttattacagtctgcaggtcataacgttacggcgattgatctttttgctagcgggagtaatcctcaccaactggaacagattggcacatggcgccagtactcagaaccattgttcaccctgatcgaatcgattccggaaggtaagaaagtcattctggtaggagaagcgggtggcggcatcaatattgcactggccgcggagaaatatccggagaaagtgagcgctctcgtctttgtgaacggtcttatgcccgatatcgatcacagtccagcgttcgtggtgaagaaatacagcgaagttttcactgactggaaagattcgatcttcagcaattatacctacggtaacgacacggtcaccgcggttgaattgggagatcgtactctggagaacatcttctccaattctccgattgaagatgtagaactggcgaaacatctggtccgcaaaggctccttttttgaacaagacttggataccctgccgaactttacgtcggaagggtatggttcaattcgtcgtgtgtatgtttacggcgaagaagaccagatctttagccgcgattttcagttatggcaaattaataattataagcctgataaagtgtactgtgtaccgagtgctgaccacaagattatgatcagccgcgtcaacgagctggcccagattctccaagaagttgcaaactctgcgagcgatcttcttgcggtgtcg

SEQ ID NO: 120 - protein, 262 aa, synthetic construct
  REGION 1..262: note = Description of Artificial Sequence: Synthetic polypeptide
MVSAHFILIHSICHGAWLWYKLIPLLQSAGHNVTAIDLFASGSNPHQLEQIGTWRQYSEPLFTLIESIPEGKKVILVGEAGGGINIALAAEKYPEKVSALVFVNGLMPDIDHSPAFVVKKYSEVFTDWKDSIFSNYTYGNDTVTAVELGDRTLENIFSNSPIEDVELAKHLVRKGSFFEQDLDTLPNFTSEGYGSIRRVYVYGEEDQIFSRDFQLWQINNYKPDKVYCVPSADHKIMISRVNELAQILQEVANSASDLLAVS

SEQ ID NO: 121 - DNA, 786 bp, synthetic construct
  misc_feature 1..786: note = Description of Artificial Sequence: Synthetic polynucleotide
  source 1..786: mol_type = other DNA
atggttagtgcgcattttattctgatccacagtatctgccatggcgcctggctgtggtataaactgatcccgttattacagtctgcaggtcataacgttacggcgattgatctttttgctagcgggagtaatcctcaccaactggaacagattggcacatggcgccagtactcagaaccattgttcaccctgatcgaatcgattccggaaggtaagaaagtcattctggtaggagaagcgggtggcggcatcaatattgcactggccgcggagaaatatccggagaaagtgagcgctctcgtctttgtgaacggtcttatgcccgatatcgatcacagtccagcgttcgtggtaaagaaatatagcgaagttttcactgactggaaagattcgatcttcagcaattatacctacggtaacgacacggtcaccgcggttgaattgggagatcgtactctggagaacatcttctccaattctccgattgaagatgtagaactggcgaaacatctggtccgcaaaggctccttttttctgcaagacttggataccctgccgaactttacgtcggaagggtatggttcaattcgtcgtgtgtatgtttacggcgaagaagaccagatctttagccgcgattttcagttatggcaaattaataattataagcctgataaagtgtactgtgtaccgagtgctgaccacaagattatgatcagcaaagtcaacgagctggcccagattctccaagaagttgcaaactctgcgagcgatcttcttgcggtgagt

SEQ ID NO: 122 - protein, 262 aa, synthetic construct
  REGION 1..262: note = Description of Artificial Sequence: Synthetic polypeptide
MVSAHFILIHSICHGAWLWYKLIPLLQSAGHNVTAIDLFASGSNPHQLEQIGTWRQYSEPLFTLIESIPEGKKVILVGEAGGGINIALAAEKYPEKVSALVFVNGLMPDIDHSPAFVVKKYSEVFTDWKDSIFSNYTYGNDTVTAVELGDRTLENIFSNSPIEDVELAKHLVRKGSFFLQDLDTLPNFTSEGYGSIRRVYVYGEEDQIFSRDFQLWQINNYKPDKVYCVPSADHKIMISKVNELAQILQEVANSASDLLAVS

SEQ ID NO: 123 - DNA, 786 bp, synthetic construct
  misc_feature 1..786: note = Description of Artificial Sequence: Synthetic polynucleotide
  source 1..786: mol_type = other DNA
atggttagtgcgcattttattctgatccacagtatctgccatggcgcctggctgtggtataaactgatcccgttattacagtctgcaggtcataacgttacggcgattgatctttttgctagcgggagtaatcctcaccaactggaacagattggcacatggcgccagtactcagaaccattgttcaccctgatcgaatcgattccggaaggtaagaaagtcattctggtaggagaagcgggtggcggcatcaatattgcactggccgcggagaaatatccggagaaagtgagcgctctcgtctttgtgaacggccttatgcccgatatcgatcacagtccagcgttcgtggtaaagaaatatagcgaagttttcactgactggaaagattcgatcttcagcaattatacctacggtaacgacacggtcaccgcggttgaattgggagatcgtactctggagaacatcttctccaattctccgattgaagatgtagaactggcgaaacatcgtgtccgcaaaggctccttttttctgcaagacttggataccctgccgaactttacgtcggaagggtatggttcaattcgtcgtgtgtatgtttacggcgaagaagaccagatctttagccgcgattttcagttatggcaaattaataattataagcctgataaagtgtactgtgtaccgagtgctgaccacaagattatgatcagccgcgtcaacgagctggcccagattctccaagaagttgcaaactctgcgagcgatcttcttgcggtgagt

SEQ ID NO: 124 - protein, 262 aa, synthetic construct
  REGION 1..262: note = Description of Artificial Sequence: Synthetic polypeptide
MVSAHFILIHSICHGAWLWYKLIPLLQSAGHNVTAIDLFASGSNPHQLEQIGTWRQYSEPLFTLIESIPEGKKVILVGEAGGGINIALAAEKYPEKVSALVFVNGLMPDIDHSPAFVVKKYSEVFTDWKDSIFSNYTYGNDTVTAVELGDRTLENIFSNSPIEDVELAKHRVRKGSFFLQDLDTLPNFTSEGYGSIRRVYVYGEEDQIFSRDFQLWQINNYKPDKVYCVPSADHKIMISRVNELAQILQEVANSASDLLAVS

SEQ ID NO: 125 - DNA, 786 bp, synthetic construct
  misc_feature 1..786: note = Description of Artificial Sequence: Synthetic polynucleotide
  source 1..786: mol_type = other DNA
atggttagtgcgcattttattctgatccacagtatctgccatggcgcctggctgtggtataaactgatcccgttattacagtctgcaggtcataacgttacggcgattgatctttttgctagcgggagtaatcctcaccaactggaacagattggcacatgggaacagtactcagaaccattgttcaccctgatcgaatcgattccggaaggtaagaaagtcattctggtaggagaagcgggtggcggcatcaatattgcactggccgcggagaaatatccggagaaagtgagcgctctcgtctttgtgaacggtcttatgcccgatatcgatcacagtccagcgttcgtggtaaagaaatatagcgaagttttcactgactggaaagattcgatcttcagcaattatacctacggtaacgacacggtcaccgcggttgaattgggagatcgtactctggagaacatcttctccaattctccgattgaagatgtagaactggcgaaacatcgtgtccgcaaaggctccttttttctgcaagacttggataccctgccgaactttacgtcggaagggtatggttcaattcgtcgtgtgtatgtttacggcgaagaagaccagatctttagccgcgattttcagttatggcaaattaataattataagcctgataaagtgtactgtgtaccgagtgctgaccacaagattatgatcagccgcgtcaacgagctggcccagattctccaagaagttgcaaactctgcgagcgatcttcttgcggtggcg

SEQ ID NO: 126 - protein, 262 aa, synthetic construct
  REGION 1..262: note = Description of Artificial Sequence: Synthetic polypeptide
MVSAHFILIHSICHGAWLWYKLIPLLQSAGHNVTAIDLFASGSNPHQLEQIGTWEQYSEPLFTLIESIPEGKKVILVGEAGGGINIALAAEKYPEKVSALVFVNGLMPDIDHSPAFVVKKYSEVFTDWKDSIFSNYTYGNDTVTAVELGDRTLENIFSNSPIEDVELAKHRVRKGSFFLQDLDTLPNFTSEGYGSIRRVYVYGEEDQIFSRDFQLWQINNYKPDKVYCVPSADHKIMISRVNELAQILQEVANSASDLLAVA

SEQ ID NO: 127 - DNA, 786 bp, synthetic construct
  misc_feature 1..786: note = Description of Artificial Sequence: Synthetic polynucleotide
  source 1..786: mol_type = other DNA
atggttagtgcgcattttattctgatccacagtgtctgccatggcgcctggctgtggtataaactgatcccgttattacagtctgcaggtcataacgttacggcgattgatctttttgctagcgggagtaatcctcaccaactggaacagattggcacatggcgccagtactcagaaccattgttcacgctgatcgaaagcattccggaaggtaagaaagtcattctggtaggagaagcgggtggcggcatcaatattgcactggccgcggagaaatatccggagaaagtgagcgctctcgtctttgtgaacggtcttatgcccgatatcgatcacagtccagcgttcgtggtaaagaaatatagcgaagttttcactgactggaaagattcgatcttcagcaactatacctacggtaacgacacggtcaccgcggttgaattgggagatcgtactctggagaacatcttctccaactctccgattgaagatgtagaactggcgaaacatcgtgtccgcaaaggctccttttttctgcaagacttggataccctgccgaactttacgtcggaagggtatggttcaattcgtcgtgtgtatgtttacggcgaagaagaccgcatctttagccgcgattttcagttatggcaaattaataattataagcctgataaagtgtactgtgtaccgggtgctgaccacaagattatgatcagccgcgtcaacgagctggcccagattctccaagaagttgcaaactctgcgagcgatcttcttgcggtgagt

SEQ ID NO: 128 - protein, 262 aa, synthetic construct
  REGION 1..262: note = Description of Artificial Sequence: Synthetic polypeptide
MVSAHFILIHSVCHGAWLWYKLIPLLQSAGHNVTAIDLFASGSNPHQLEQIGTWRQYSEPLFTLIESIPEGKKVILVGEAGGGINIALAAEKYPEKVSALVFVNGLMPDIDHSPAFVVKKYSEVFTDWKDSIFSNYTYGNDTVTAVELGDRTLENIFSNSPIEDVELAKHRVRKGSFFLQDLDTLPNFTSEGYGSIRRVYVYGEEDRIFSRDFQLWQINNYKPDKVYCVPGADHKIMISRVNELAQILQEVANSASDLLAVS

SEQ ID NO: 129 - DNA, 786 bp, synthetic construct
  misc_feature 1..786: note = Description of Artificial Sequence: Synthetic polynucleotide
  source 1..786: mol_type = other DNA
atggttagtgcgcattttattctgatccacagtgtctgccatggcgcctggctgtggtataaactgatcccgttattacagtctgcaggtcataacgttacggcgattgatctttttgctagcgggagtaatcctcaccaactggaagaaattggcacatggtgccagtactcagaaccattgttcacgctgatcgaacgcattccggaaggtaagaaagtcattctggtaggagaagcgggtggcggcatcaatattgcactggccgcggagaaatatccggagaaagtgagcgctctcgtctttgtgaacggtcttatgcccgatatcgatcacagtccagcgttcgtggtaaagaaatacggcgaagttttcactgactggaaagattcgatcttcagcaattatacctacggtaacgacacggtcaccgcggttgaattgggagatcgtactctggagaacatcttctccaattctccgattgaagatgtagaactggcgaaacatcgtgtccgcaaaggctccttttttctgcaagacttggataccctgccgaactttacgtcggaagggtatggttcaattcgccgtgtgtatgtttacggcgaagaagaccgcatctttagccgcgattttcagttatggcaaattaacaattataagcctgataaagtgtactgtgtaccgagtgctgaccacaagattatgatcagccgcgtcaacgagctggcccagattctccaagaagttgcaaactctgcgagcgatcttcttgcggtgagt

SEQ ID NO: 130 - protein, 262 aa, synthetic construct
  REGION 1..262: note = Description of Artificial Sequence: Synthetic polypeptide
MVSAHFILIHSVCHGAWLWYKLIPLLQSAGHNVTAIDLFASGSNPHQLEEIGTWCQYSEPLFTLIERIPEGKKVILVGEAGGGINIALAAEKYPEKVSALVFVNGLMPDIDHSPAFVVKKYGEVFTDWKDSIFSNYTYGNDTVTAVELGDRTLENIFSNSPIEDVELAKHRVRKGSFFLQDLDTLPNFTSEGYGSIRRVYVYGEEDRIFSRDFQLWQINNYKPDKVYCVPSADHKIMISRVNELAQILQEVANSASDLLAVS

SEQ ID NO: 131 - DNA, 786 bp, synthetic construct
  misc_feature 1..786: note = Description of Artificial Sequence: Synthetic polynucleotide
  source 1..786: mol_type = other DNA
atggttagtgcgcattttattctgatccacagtgtctgccatggcgcctggctgtggtataaactgatcccgttattacagtctgcaggtcataacgttacggcgattgatctttttgctagcgggagtaatcctcaccaactggaagaaattggcacatggcgccagtactcagaaccattgttcagcctgatcgaaagcattccggaaggtaagaaagtcattctggtaggagaagcgggtggcggcatcaatattgcactggccgcggagaaatatccggagaaagtgagcgctctcgtctttgtgaacggtcttatgcccgatatcgatcacagtccagcgttcgtggtaaagaaatacggcgaagttttcactgactggaaagattcgatcttcagcaattatacctacggtaacgacacggtcaccgcggttgaattgggagatcgtactctggagaacatcttctccaactctccgattgaagatgtagaactggcgaaagctcgtgtccgcaaaggctccttttttctgcaagacttggataccctgccgaactttacgtcggaagggtatggttcaattcgtcgtgtgtatgtttacggcgaagaagaccagatctttagccgcgattttcagttatggcaaattaccaattataagcctgataaagtgtactgtgtaccgggtgctgaccacaagattatgatcagccgcgtcaacgagctggcccagattctccaagaagttgcaaactctgcgagcgatcttcttgcggtgagt

SEQ ID NO: 132 - protein, 262 aa, synthetic construct
  REGION 1..262: note = Description of Artificial Sequence: Synthetic polypeptide
MVSAHFILIHSVCHGAWLWYKLIPLLQSAGHNVTAIDLFASGSNPHQLEEIGTWRQYSEPLFSLIESIPEGKKVILVGEAGGGINIALAAEKYPEKVSALVFVNGLMPDIDHSPAFVVKKYGEVFTDWKDSIFSNYTYGNDTVTAVELGDRTLENIFSNSPIEDVELAKARVRKGSFFLQDLDTLPNFTSEGYGSIRRVYVYGEEDQIFSRDFQLWQITNYKPDKVYCVPGADHKIMISRVNELAQILQEVANSASDLLAVS

SEQ ID NO: 133 - DNA, 786 bp, synthetic construct
  misc_feature 1..786: note = Description of Artificial Sequence: Synthetic polynucleotide
  source 1..786: mol_type = other DNA
atggttagtgcgcattttattctgatccacagtgtctgccatggcgcctggctgtggtataaactgatcccgttattacagtctgcaggtcataacgttacggcgattgatctttttgctagcgggagtaatcctcaccaactggaacagattggcacatggcgccagtactcagaaccattgttcaccctgatcgaaagcattccggaaggtaagaaagtcattctggtaggagaagcgggtggcggcatcaatattgcactggccgcggagaaatatccggagaaagtgagcgctctcgtctttgtgaacggtcttatgcccgatatcgatcacagtccagcgttcgtggtaaagaaatacggcgaagttttcactgactggaaagattcgatcttcagcaattatacctacggtaacgacacggtcaccgcggttgaattgggagatcgtactctggagaacatcttctccaattctccgattgaagatgtagaactggcgaaacatcgtgtccgcaaaggctccttttttctgcaagacttggataccctgccgaactttacgtcggaagggtatggttcaattcgtcgtgtgtatgtttacggcgaagaagaccgcatctttagccgcgattttcagttatggcaaattaataattataagcctgataaagtgtactgtgtaccgggtgctgaccacaagattatgatcagccgcgtcaacgagctggcccagattctccaagaagttgcaaactctgcgagcgatcttcttgcggtgagt

SEQ ID NO: 134 - protein, 262 aa, synthetic construct
  REGION 1..262: note = Description of Artificial Sequence: Synthetic polypeptide
MVSAHFILIHSVCHGAWLWYKLIPLLQSAGHNVTAIDLFASGSNPHQLEQIGTWRQYSEPLFTLIESIPEGKKVILVGEAGGGINIALAAEKYPEKVSALVFVNGLMPDIDHSPAFVVKKYGEVFTDWKDSIFSNYTYGNDTVTAVELGDRTLENIFSNSPIEDVELAKHRVRKGSFFLQDLDTLPNFTSEGYGSIRRVYVYGEEDRIFSRDFQLWQINNYKPDKVYCVPGADHKIMISRVNELAQILQEVANSASDLLAVS

SEQ ID NO: 135 - DNA, 786 bp, synthetic construct
  misc_feature 1..786: note = Description of Artificial Sequence: Synthetic polynucleotide
  source 1..786: mol_type = other DNA
atggttagtgcgcattttattctgatccacagtgtctgccatggcgcctggctgtggtataaactgatcccgttattacagtctgcaggtcataacgttacggcgattgatctttttgctagcgggagtaatcctcaccaactggaacagattggcacatggcgccagtactcagaaccattgttcaccctgatcgaatcgattccggaaggtaagaaagtcattctggtaggagaagcgggtggcggcatcaatattgcactggccgcggagaaatatccggagaaagtgagcgctctcgtctttgtgaacggtcttatgcccgatatcgatcacagtccagcgttcgtggtaaagaaatatagcgaagttttcactgactggggggattcgatcttcagcaattatacctacggtaacgacacggtcaccgcggttgaattgggagatcgtactctggagaacatcttctccaattctccgattgaagatgtagaactggcgaaacatcgtgtccgcaaaggctccttttttctgcaagacttggataccctgccgaactttacgtcggaagggtatggttcaattcgtcgtgtgtatgtttacggcgaagaagaccagatctttagccgcgattttcagttatggcaaattaataattataagcctgataaagtgtactgtgtaccgagtgctgaccacaagattatgatcagccgcgtcaacgagctggcccagattctccaagaagttgcaaactctgcgagcgatcttcttgcggtgagt

SEQ ID NO: 136 - protein, 262 aa, synthetic construct
  REGION 1..262: note = Description of Artificial Sequence: Synthetic polypeptide
MVSAHFILIHSVCHGAWLWYKLIPLLQSAGHNVTAIDLFASGSNPHQLEQIGTWRQYSEPLFTLIESIPEGKKVILVGEAGGGINIALAAEKYPEKVSALVFVNGLMPDIDHSPAFVVKKYSEVFTDWGDSIFSNYTYGNDTVTAVELGDRTLENIFSNSPIEDVELAKHRVRKGSFFLQDLDTLPNFTSEGYGSIRRVYVYGEEDQIFSRDFQLWQINNYKPDKVYCVPSADHKIMISRVNELAQILQEVANSASDLLAVS

SEQ ID NO: 137 - DNA, 786 bp, synthetic construct
  misc_feature 1..786: note = Description of Artificial Sequence: Synthetic polynucleotide
  source 1..786: mol_type = other DNA
atggttagtgcgcattttattctgatccacagtgtctgccatggcgcctggctgtggtataaactgatcccgttattacagtctgcaggtcataacgttacggcgattgatctttttgctagcgggagtaatcctcaccaactggaacagattggcacatggcgccagtactcagaaccattgttcaccctgatcgaatcgattccggaaggtaagaaagtcattctggtaggagaagcggcgggcggcatcaatattgcactggccgcggagaaatatccggagaaagtgagcgctctcgtctttgtgaacggtcttatgcccgatatcgatcacagtccagcgttcgtggtaaagaaatatagcgaagttttcactgactggaaagattcgatcttcagcaattatacctacggtaacgacacggtcaccgcggttgaattgggagatcgtactctggagaacatcttctccaattctccgattgaagatgtagaactggcgaaacatcgtgtccgcaaaggctccttttttctgcaagacttggataccctgccgaactttacgtcggaagggtatggttcaattcgtcgtgtgtatgtttacggcgaagaagaccagatctttagccgcgattttcagttatggcaaattaataattataagcctgataaagtgtactgtgtaccgagtgctgaccacaagattatgatcagccgcgtcaacgagctggcccagattctccaagaagttgcaaactctgcgagcgatcttcttgcggtgagt

SEQ ID NO: 138 - protein, 262 aa, synthetic construct
  REGION 1..262: note = Description of Artificial Sequence: Synthetic polypeptide
MVSAHFILIHSVCHGAWLWYKLIPLLQSAGHNVTAIDLFASGSNPHQLEQIGTWRQYSEPLFTLIESIPEGKKVILVGEAAGGINIALAAEKYPEKVSALVFVNGLMPDIDHSPAFVVKKYSEVFTDWKDSIFSNYTYGNDTVTAVELGDRTLENIFSNSPIEDVELAKHRVRKGSFFLQDLDTLPNFTSEGYGSIRRVYVYGEEDQIFSRDFQLWQINNYKPDKVYCVPSADHKIMISRVNELAQILQEVANSASDLLAVS

SEQ ID NO: 139 - DNA, 783 bp, synthetic construct
  misc_feature 1..783: note = Description of Artificial Sequence: Synthetic polynucleotide
  source 1..783: mol_type = other DNA
atgagtgcgcattttattctgatccacagtgtctgccatggcgcctggctgtggtataaactgatcccgttattacagtctgcaggtcataacgttacggcgattgatctttttgctagcgggagtaatcctcaccaactggaacagattggcacatggcgccagtactcagaaccattgttcaccctgatcgaatcgattccggaaggtaagaaagtcattctggtaggagaagcgggtggcggcatcaatattgcactggccgcggagaaatatccggagaaagtgagcgctctcgtctttgtgaacggtcttatgcccgatatcgatcacagtccagcgttcgtggtaaagaaatatagcgaagttttcactgactggaaagattcgatcttcagcaattatacctacggtaacgacacggtcaccgcggttgaattgggagatcgtactctggagaacatcttctccaattctccgattgaagatgtagaactggcgaaacatcgtgtccgcaaaggctccttttttctgcaagacttggataccctgccgaactttacgtcggaagggtatggttcaattcgtcgtgtgtatgtttacggcgaagaagaccagatctttagccgcgattttcagttatggcaaattaataattataagcctgataaagtgtactgtgtaccgagtgctgaccacaagattatgatcagccgcgtcaacgagctggcccagattctccaagaagttgcaaactctgcgagcgatcttcttgcggtgagt

SEQ ID NO: 140 - protein, 261 aa, synthetic construct
  REGION 1..261: note = Description of Artificial Sequence: Synthetic polypeptide
MSAHFILIHSVCHGAWLWYKLIPLLQSAGHNVTAIDLFASGSNPHQLEQIGTWRQYSEPLFTLIESIPEGKKVILVGEAGGGINIALAAEKYPEKVSALVFVNGLMPDIDHSPAFVVKKYSEVFTDWKDSIFSNYTYGNDTVTAVELGDRTLENIFSNSPIEDVELAKHRVRKGSFFLQDLDTLPNFTSEGYGSIRRVYVYGEEDQIFSRDFQLWQINNYKPDKVYCVPSADHKIMISRVNELAQILQEVANSASDLLAVS

SEQ ID NO: 141 - DNA, 783 bp, synthetic construct
  misc_feature 1..783: note = Description of Artificial Sequence: Synthetic polynucleotide
  source 1..783: mol_type = other DNA
atgagtgcgcattttattctgatccacagtatttgccatggcgcctggctgtggtataaactgatcccgttattacagtctgcaggtcataacgttacggcgattgatctttttgctagcgggagtaatcctcaccaactggaacagattggcacatggcgccagtactcagaaccattgttcaccctgatcgaatcgattccggaaggtaagaaagtcattctggtaggagaagcgggtggcggcatcaatattgcactggccgcggagaaatatccggagaaagtgagcgctctcgtctttgtgaacggtcttatgcccgatatcgatcacagtccagcgttcgtggtaaagaaatatagcgaagttttcactgactggaaagattcgatcttcagcaattatacctacggtaacgacacggtcaccgcggttgaattgggagatcgtactctggagaacatcttctccaattctccgattgaagatgtagaactggcgaaacatcgtgtccgcaaaggctccttttttctgcaagacttggataccctgccgaactttacgtcggaagggtatggttcaattcgtcgtgtgtatgtttacggcgaagaagaccagatctttagccgcgattttcagttatggcaaattaataattataagcctgataaagtgtactgtgtaccgagtgctgaccacaagattatgatcagccgcgtcaacgagctggcccagattctccaagaagttgcaaactctgcgagcgatcttcttgcggtgagt

SEQ ID NO: 142 - protein, 261 aa, synthetic construct
  REGION 1..261: note = Description of Artificial Sequence: Synthetic polypeptide
MSAHFILIHSICHGAWLWYKLIPLLQSAGHNVTAIDLFASGSNPHQLEQIGTWRQYSEPLFTLIESIPEGKKVILVGEAGGGINIALAAEKYPEKVSALVFVNGLMPDIDHSPAFVVKKYSEVFTDWKDSIFSNYTYGNDTVTAVELGDRTLENIFSNSPIEDVELAKHRVRKGSFFLQDLDTLPNFTSEGYGSIRRVYVYGEEDQIFSRDFQLWQINNYKPDKVYCVPSADHKIMISRVNELAQILQEVANSASDLLAVS

SEQ ID NO: 143 - DNA, 777 bp, synthetic construct
  misc_feature 1..777: note = Description of Artificial Sequence: Synthetic polynucleotide
  source 1..777: mol_type = other DNA
atgagtgcgcattttattctgatccacagtgtctgccatggcgcctggctgtggtataaactgatcccgttattacagtctgcaggtcataacgttacggcgattgatcttttcgctagcgggagtaatcctcaccaactggaagaaattggcacatggcgccagtactcagaaccattgttcaccctgatcgaatcgattccggaaggtaagaaagtcattctggtaggagaagcggggggcggcatcaatattgcactggccgcggagaaatatccggagaaagtgagcgctctcgtctttgtgaacggtcttatgcccgatatcgatcacagtccagcgttcgtggtaaagaaatatagcgaattcactgactggggcgattcgatcttcagcaattatacctacggtaacgacacggtcaccgcggttgaattgggagatcgtactctggagaacatcttctccaattctccgattgaagatgtagaactggcgaaacatcgtgtccgcaaaggctccttttttctgcaagacttggataccctgccgaactttacgtcggaagggtatggttcaattcgtcgtgtgtatgtttacggcgaagaagaccaaatctttagccgcgattttcagttatggcaaattaataattataagcctgataaagtgtactgtgtaccgagtgctgaccacaagattatgatcagccgtgtcaacgagctggcccagattctccaagaagttgcaaactctgcgagcgatcttgcggtgagt

SEQ ID NO: 144 - protein, 259 aa, synthetic construct
  REGION 1..259: note = Description of Artificial Sequence: Synthetic polypeptide
MSAHFILIHSVCHGAWLWYKLIPLLQSAGHNVTAIDLFASGSNPHQLEEIGTWRQYSEPLFTLIESIPEGKKVILVGEAGGGINIALAAEKYPEKVSALVFVNGLMPDIDHSPAFVVKKYSEFTDWGDSIFSNYTYGNDTVTAVELGDRTLENIFSNSPIEDVELAKHRVRKGSFFLQDLDTLPNFTSEGYGSIRRVYVYGEEDQIFSRDFQLWQINNYKPDKVYCVPSADHKIMISRVNELAQILQEVANSASDLAVS

SEQ ID NO: 145 - DNA, 780 bp, synthetic construct
  misc_feature 1..780: note = Description of Artificial Sequence: Synthetic polynucleotide
  source 1..780: mol_type = other DNA
atgagtgcgcattttattctgatccacagtatctgccatggcgcctggctgtggtataaactgatcccgttattacagtctgcaggtcataacgttacggcgattgatcttgtcgctagcgggagtaatcctcaccaactggaagaaattggcacatggcgccagtactcagaaccattgttcaccctgatcgaatcgattccggaaggtaagaaagtcattctggtaggagaagcggggggcggcatcaatattgcactggccgcggagaaatatccggagaaagtgagcgctctcgtctttgtgaacggtcttatgcccgatatcgatcacagtccagcgttcgtggtaaagaaatatagcgaagttttcactgactggaaagattcgatcttcagcaattatacctacggtaacgacacggtcaccgcggttgaattgggagatcgtaccctggagaatatcttctccaattctccgattgaagatgtagaactggcgaaacatcgtgtccgcaaaggctccttttttctgcaagacttggataccctgccgaactttacgtcggaagggtatggttcaattcgtcgtgtgtatgtttacggcgaagaagaccaagtctttagccgcgattttcagttatggcaaattaataattataagcctgataaagtgtactgtgtaccgagtgctgaccacaagattatgatcagcaaagtcaacgagctggcccagattctccaagaagttgcaaactctgcgagcgatcttgcggtgagt

SEQ ID NO: 146 - protein, 260 aa, synthetic construct
  REGION 1..260: note = Description of Artificial Sequence: Synthetic polypeptide
MSAHFILIHSICHGAWLWYKLIPLLQSAGHNVTAIDLVASGSNPHQLEEIGTWRQYSEPLFTLIESIPEGKKVILVGEAGGGINIALAAEKYPEKVSALVFVNGLMPDIDHSPAFVVKKYSEVFTDWKDSIFSNYTYGNDTVTAVELGDRTLENIFSNSPIEDVELAKHRVRKGSFFLQDLDTLPNFTSEGYGSIRRVYVYGEEDQVFSRDFQLWQINNYKPDKVYCVPSADHKIMISKVNELAQILQEVANSASDLAVS

SEQ ID NO: 147 - DNA, 780 bp, synthetic construct
  misc_feature 1..780: note = Description of Artificial Sequence: Synthetic polynucleotide
  source 1..780: mol_type = other DNA
atgagtgcgcattttattctgatccacagtgtctgccatggcgcctggctgtggtataaactgatcccgttattacagtctgcaggtcataacgttacggcgattgatcttgtcgctagcgggagtaatcctcaccaactggaagaaattggcacatggcgccagtactcagaaccattgttcaccctgatcgaatcgattccggaaggtaagaaagtcattctggtaggagaagcggcgggcggcatcaatattgcactggccgcggagaaatatccggagaaagtgagcgctctcgtctttgtgaacggtcttatgcccgatatcgatcacagtccagcgttcgtggtaaagaaatatagcgaagttttcactgactggaaagattcgatcttcagcaattatacctacggtaacgacacggtcaccgcggttgaattgggagatcgtctgctggaggcgatcttctccatgtctccgattgaagatgtagaactggcgaaacatcgtgtccgcaaaggctccttttttctgcaagacttggataccctgccgaactttacgtcggaagggtatggttcaattcgtcgtgtgtatgtttacggcgaagaagaccaagtctttagccgcgattttcagttatggcaaattaataattataagcctgataaagtgtactgtgtaccgggtgctgaccacaagattatgatcagcaaagtcaacgagctggcccagattctccaagaagttgcaaactctgcgagcgatcttgcggtgagt

SEQ ID NO: 148 - protein, 260 aa, synthetic construct
  REGION 1..260: note = Description of Artificial Sequence: Synthetic polypeptide
MSAHFILIHSVCHGAWLWYKLIPLLQSAGHNVTAIDLVASGSNPHQLEEIGTWRQYSEPLFTLIESIPEGKKVILVGEAAGGINIALAAEKYPEKVSALVFVNGLMPDIDHSPAFVVKKYSEVFTDWKDSIFSNYTYGNDTVTAVELGDRLLEAIFSMSPIEDVELAKHRVRKGSFFLQDLDTLPNFTSEGYGSIRRVYVYGEEDQVFSRDFQLWQINNYKPDKVYCVPGADHKIMISKVNELAQILQEVANSASDLAVS

SEQ ID NO: 149 - DNA, 780 bp, synthetic construct
  misc_feature 1..780: note = Description of Artificial Sequence: Synthetic polynucleotide
  source 1..780: mol_type = other DNA
atgagtgcgcattttattctgatccacagtatctgccatggcgcctggctgtggtataaactgatcccgttattacagtctgcaggtcataacgttacggcgattgatcttttcgctagcgggagtaatcctcaccaactggaagaaattggcacatggcgccagtactcagaaccattgttcaccctgatcgaatcgattccggaaggtaagaaagtcattctggtaggagaagcggggggcggcatcaatattgcactggccgcggagaaatatccggagaaagtgagcgctctcgtctttgtgaacggtcttatgcccgatatcgatcacagtccagcgttcgtggtaaagaaatatagcgaagttttcactgactggaaagattcgatcttcagcaattatacctacggtaacgacacggtcaccgcggttgaattgggagatcgtactctggagaacatcttctccaattctccgattgaagatgtagaactggcgaaacatcgtgtccgcaaaggctccttttttctgcaagacttggataccctgccgaactttacgtcggaagggtatggttcaattcgtcgtgtgtatgtttacggcgaagaagaccagatctttagccgcgattttcagttatggcaaattaataattataagcctgataaagtgtactgtgtaccgagtgctgaccacaagattatgatcagccgcgtcaacgagctggcccagattctccaagaagttgcaaactctgcgagcgatcttgcggtgagt

SEQ ID NO: 150 - protein, 260 aa, synthetic construct
  REGION 1..260: note = Description of Artificial Sequence: Synthetic polypeptide
MSAHFILIHSICHGAWLWYKLIPLLQSAGHNVTAIDLFASGSNPHQLEEIGTWRQYSEPLFTLIESIPEGKKVILVGEAGGGINIALAAEKYPEKVSALVFVNGLMPDIDHSPAFVVKKYSEVFTDWKDSIFSNYTYGNDTVTAVELGDRTLENIFSNSPIEDVELAKHRVRKGSFFLQDLDTLPNFTSEGYGSIRRVYVYGEEDQIFSRDFQLWQINNYKPDKVYCVPSADHKIMISRVNELAQILQEVANSASDLAVS

SEQ ID NO: 151 - DNA, 780 bp, synthetic construct
  misc_feature 1..780: note = Description of Artificial Sequence: Synthetic polynucleotide
  source 1..780: mol_type = other DNA
atgagtgcgcattttattctgatccacagtatctgccatggcgcctggctgtggtataaactgatcccgttattacagtctgcaggtcataacgttacggcgattgatctttttgctagcgggagtaatcctcaccaactggaagaaattggcacatggcgccagtactcagaaccattgttcaccctgatcgaatcgattccggaaggtaagaaagtcattctggtaggagaagcgggtggcggcatcaatattgcactggccgcggagaaatatccggagaaagtgagcgctctcgtctttgtgaacggtcttatgcccgatatcgatcacagtccagcgttcgtggtaaagaaatatagcgaagttttcactgactggaaagattcgatcttcagcaattatacctacggtaacgacacggtcaccgcggttgaattgggagatcgtaccctggagctgatcttctccaattctccgattgaagatgtagaactggcgaaacatcgtgtccgcaaaggctccttttttctgcaagacttggataccctgccgaactttacgtcggaagggtatggttcaattcgtcgtgtgtatgtttacggcgaagaagaccaagtctttagccgcgattttcagttatggcaaattaataattataagcctgataaagtgtactgtgtaccgagtgctgaccacaagattatgatcagcaaagtcaacgagctggcccagattctccaagaagttgcaaactctgcgagcgatcttgcggtgagt

SEQ ID NO: 152 - protein, 260 aa, synthetic construct
  REGION 1..260: note = Description of Artificial Sequence: Synthetic polypeptide
MSAHFILIHSICHGAWLWYKLIPLLQSAGHNVTAIDLFASGSNPHQLEEIGTWRQYSEPLFTLIESIPEGKKVILVGEAGGGINIALAAEKYPEKVSALVFVNGLMPDIDHSPAFVVKKYSEVFTDWKDSIFSNYTYGNDTVTAVELGDRTLELIFSNSPIEDVELAKHRVRKGSFFLQDLDTLPNFTSEGYGSIRRVYVYGEEDQVFSRDFQLWQINNYKPDKVYCVPSADHKIMISKVNELAQILQEVANSASDLAVS

SEQ ID NO: 153 - DNA, 783 bp, synthetic construct
  misc_feature 1..783: note = Description of Artificial Sequence: Synthetic polynucleotide
  source 1..783: mol_type = other DNA
atgagtgcgcattttattctgatccacagtgtctgccatggcgcctggctgtggtataaactgatcccgttattacagtctgcaggtcataacgttacggcgattgatcttttcgctagcgggagtaatcctcaccaactggaagaaattggcacatggcgccagtactcagaaccattgttcaccctgatcgaatcgattccggaaggtaagaaagtcattctggtaggagaagcggggggcggcatcaatattgcactggccgcggagaaatatccggagaaagtgagcgctctcgtctttgtgaacggtcttatgcccgatatcgatcacagtccagcgttcgtggtaaagaaatatagcgaagttttcactgactggaaagattcgatcttcagcaattatacctacggtaacgacacggtcaccgcggttgaattgggagatcgtctgctggaggcgatcttctcctgttctccgattgaagatgtagaactggcgaaacatcgtgtccgcaaaggctccttttttctgcaagacttggataccctgccgaactttacgtcggaagggtatggttcaattcgtcgtgtgtatgtttacggcgaagaagaccgcgtctttagccgcgattttcagttatggcaaattaataattataagcctgataaagtgtactgtgtaccgagtgctgaccacaagattatgatcagcaaagtcaacgagctggcccagattctccaagaagttgcaaactctgcgagcgatctgcttgcggtgagt

SEQ ID NO: 154 - protein, 261 aa, synthetic construct
  REGION 1..261: note = Description of Artificial Sequence: Synthetic polypeptide
MSAHFILIHSVCHGAWLWYKLIPLLQSAGHNVTAIDLFASGSNPHQLEEIGTWRQYSEPLFTLIESIPEGKKVILVGEAGGGINIALAAEKYPEKVSALVFVNGLMPDIDHSPAFVVKKYSEVFTDWKDSIFSNYTYGNDTVTAVELGDRLLEAIFSCSPIEDVELAKHRVRKGSFFLQDLDTLPNFTSEGYGSIRRVYVYGEEDRVFSRDFQLWQINNYKPDKVYCVPSADHKIMISKVNELAQILQEVANSASDLLAVS

SEQ ID NO: 155 - DNA, 780 bp, synthetic construct
  misc_feature 1..780: note = Description of Artificial Sequence: Synthetic polynucleotide
  source 1..780: mol_type = other DNA
atgagtgcgcattttattctgatccacagtatctgccatggcgcctggctgtggtataaactgatcccgttattacagtctgcaggtcataacgttacggcgattgatcttgtcgctagcgggagtaatcctcaccaactggaagaaattggcacatggcgccagtactcagaaccattgttcaccctgatcgaatcgattccggaaggtaagaaagtcattctggtaggagaagcggggggcggcatcaatattgcactggccgcggagaaatatccggagaaagtgagcgctctcgtctttgtgaacggtcttatgcccgatatcgatcacagtccagcgttcgtggtaaagaaatatagcgaagttttcactgactggaaagattcgatcttcagcaattatacctacggtaacgacacggtcaccgcggttgaattgggagatcgtctgctggagaatatcttctccatgtctccgattgaagatgtagaactggcgaaacatcgtgtccgcaaaggctccttttttctgcaagacttggataccctgccgaactttacgtcggaagggtatggttcaattcgtcgtgtgtatgtttacggcgaagaagaccgcatctttagccgcgattttcagttatggcaaattaataattataagcctgataaagtgtactgtgtaccgggtgctgaccacaagattatgatcagccgcgtcaacgagctggcccagattctccaagaagttgcaaactctgcgagcgatcttcttgcggtg

SEQ ID NO: 156 - protein, 260 aa, synthetic construct
  REGION 1..260: note = Description of Artificial Sequence: Synthetic polypeptide
MSAHFILIHSICHGAWLWYKLIPLLQSAGHNVTAIDLVASGSNPHQLEEIGTWRQYSEPLFTLIESIPEGKKVILVGEAGGGINIALAAEKYPEKVSALVFVNGLMPDIDHSPAFVVKKYSEVFTDWKDSIFSNYTYGNDTVTAVELGDRLLENIFSMSPIEDVELAKHRVRKGSFFLQDLDTLPNFTSEGYGSIRRVYVYGEEDRIFSRDFQLWQINNYKPDKVYCVPGADHKIMISRVNELAQILQEVANSASDLLAV

SEQ ID NO: 157 - DNA, 783 bp, synthetic construct
  misc_feature 1..783: note = Description of Artificial Sequence: Synthetic polynucleotide
  source 1..783: mol_type = other DNA
atgagtgcgcattttattctgatccacagtatctgccatggcgcctggctgtggtataaactgatcccgttattacagtctgcaggtcataacgttacggcgattgatcttttcgctagcgggagtaatcctcaccaactggaacagattggcacatggcgccagtactcagaaccattgttcaccctgatcgaatcgattccggaaggtaagaaagtcattctggtaggagaagcggggggcggcatcaatattgcactggccgcggagaaatatccggagaaagtgagcgctctcgtctttgtgaacggtcttatgcccgatatcgatcacagtccagcgttcgtggtaaagaaatatagcgaagttttcactgactggaaagattcgatcttcagcaattatacctacggtaacgacacggtcaccgcggttgaattgggagatcgtactctggagaacatcttctccaattctccgattgaagatgtagaactggcgaaacatcgtgtccgcaaaggctccttttttctgcaagacttggataccctgccgaactttacgtcggaagggtatggttcaattcgtcgtgtgtatgtttacggcgaagaagaccaagtctttagccgcgattttcagttatggcaaattaataattataagcctgataaagtgtactgtgtaccgggtgctgaccacaagattatgatcagccgcgtcaacgagctggcccagattctccaagaagttgcaaactctgcgagcgatcttcttgcggtgagt

SEQ ID NO: 158 - protein, 261 aa, synthetic construct
  REGION 1..261: note = Description of Artificial Sequence: Synthetic polypeptide
MSAHFILIHSICHGAWLWYKLIPLLQSAGHNVTAIDLFASGSNPHQLEQIGTWRQYSEPLFTLIESIPEGKKVILVGEAGGGINIALAAEKYPEKVSALVFVNGLMPDIDHSPAFVVKKYSEVFTDWKDSIFSNYTYGNDTVTAVELGDRTLENIFSNSPIEDVELAKHRVRKGSFFLQDLDTLPNFTSEGYGSIRRVYVYGEEDQVFSRDFQLWQINNYKPDKVYCVPGADHKIMISRVNELAQILQEVANSASDLLAVS

SEQ ID NO: 159 - DNA, 783 bp, synthetic construct
  misc_feature 1..783: note = Description of Artificial Sequence: Synthetic polynucleotide
  source 1..783: mol_type = other DNA
atgagtgcgcattttattctgatccacagtatctgccatggcgcctggctgtggtataaactgatcccgttattacagtctgcaggtcataacgttacggcgattgatcttttcgctagcgggagtaatcctcaccaactggaagaaattggcacatggcgccagtactcagaaccattgttcaccctgatcgaatcgattccggaaggtaagaaagtcattctggtaggagaagcggggggcggcatcaatattgcactggccgcggagaaatatccggagaaagtgagcgctctcgtctttgtgaacggtcttatgcccgatatcgatcacagtccagcgttcgtggtaaagaaatatagcgaagttttcactgactggaaagattcgatcttcagcaattatacctacggtaacgacacggtcaccgcggttgaattgggagatcgtctgctggaggcgatcttctcctgttctccgattgaagatgtagaactggcgaaacatcgtgtccgcaaaggctccttttttctgcaagacttggataccctgccgaactttacgtcggaagggtatggttcaattcgtcgtgtgtatgtttacggcgaagaagaccaagtctttagccgcgattttcagttatggcaaattaataattataagcctgataaagtgtactgtgtaccgagtgctgaccacaagattatgatcagcaaagtcaacgagctggcccagattctccaagaagttgcaaactctgcgagcgatcttcttgcggtgagt

SEQ ID NO: 160 - protein, 261 aa, synthetic construct
  REGION 1..261: note = Description of Artificial Sequence: Synthetic polypeptide
MSAHFILIHSICHGAWLWYKLIPLLQSAGHNVTAIDLFASGSNPHQLEEIGTWRQYSEPLFTLIESIPEGKKVILVGEAGGGINIALAAEKYPEKVSALVFVNGLMPDIDHSPAFVVKKYSEVFTDWKDSIFSNYTYGNDTVTAVELGDRLLEAIFSCSPIEDVELAKHRVRKGSFFLQDLDTLPNFTSEGYGSIRRVYVYGEEDQVFSRDFQLWQINNYKPDKVYCVPSADHKIMISKVNELAQILQEVANSASDLLAVS

SEQ ID NO: 161 - DNA, 783 bp, synthetic construct
  misc_feature 1..783: note = Description of Artificial Sequence: Synthetic polynucleotide
  source 1..783: mol_type = other DNA
atgagtgcgcattttattctgatccacagtatttgccatggcgcctggctgtggtataaactgatcccgttattacagtctgcaggtcataacgttacggcgattgatcttttcgctagcgggagtaatcctcaccaactggaagaaattggcacatggcgccagtactcagaaccattgttcaccctgatcgaatcgattccggaaggtaagaaagtcattctggtaggagaagcggggggcggcatcaatattgcactggccgcggagaaatatccggagaaagtgagcgctctcgtctttgtgaacggtcttatgcccgatatcgatcacagtccagcgttcgtggtaaagaaatatagcgaagttttcactgactggaaagattcgatcttcagcaattatacctacggtaacgacacggtcaccgcggttgaattgggagatcgtctgctggaggcgatcttctcctgttctccgattgaagatgtagaactggcgaaacatcgtgtccgcaaaggctccttttttctgcaagacttggataccctgccgaactttacgtcggaagggtatggttcaattcgtcgtgtgtatgtttacggcgaagaagaccgcgtctttagccgcgattttcagttatggcaaattaataattataagcctgataaagtgtactgtgtaccgagtgctgaccacaagattatgatcagccgcgtcaacgagctggcccagattctccaagaagttgcaaactctgcgagcgatcttcttgcggtgagt

SEQ ID NO: 162 - protein, 261 aa, synthetic construct
  REGION 1..261: note = Description of Artificial Sequence: Synthetic polypeptide
MSAHFILIHSICHGAWLWYKLIPLLQSAGHNVTAIDLFASGSNPHQLEEIGTWRQYSEPLFTLIESIPEGKKVILVGEAGGGINIALAAEKYPEKVSALVFVNGLMPDIDHSPAFVVKKYSEVFTDWKDSIFSNYTYGNDTVTAVELGDRLLEAIFSCSPIEDVELAKHRVRKGSFFLQDLDTLPNFTSEGYGSIRRVYVYGEEDRVFSRDFQLWQINNYKPDKVYCVPSADHKIMISRVNELAQILQEVANSASDLLAVS

SEQ ID NO: 163 - DNA, 783 bp, synthetic construct
  misc_feature 1..783: note = Description of Artificial Sequence: Synthetic polynucleotide
  source 1..783: mol_type = other DNA
atgagtgcgcattttattctgatccacagtatttgccatggcgcctggctgtggtataaactgatcccgttattacagtctgcaggtcataacgttacggcgattgatctttttgctagcgggagtaatcctcaccaactggaacagattggcacatggcgccagtactcagaaccattgttcaccctgatcgaatcgattccggaaggtaagaaagtcattctggtaggagaagcggggggcggcatcaatattgcactggccgcggagaaatatccggagaaagtgagcgctctcgtctttgtgaacggtcttatgcccgatatcgatcacagtccagcgttcgtggtaaagaaatatagcgaagttttcactgactggaaagattcgatcttcagcaattatacctacggtaacgacacggtcaccgcggttgaattgggacagcgtctgctggagaatatcttctccatgtctccgattgaagatgtagaactggcgaaacatcgtgtccgcaaaggctccttttttctgcaagacttggataccctgccgaactttacgtcggaagggtatggttcaattcgtcgtgtgtatgtttacggcgaagaagaccgcatctttagccgcgattttcagttatggcaaattaataattataagcctgataaagtgtactgtgtaccgggtgctgaccacaagattatgatcagccgcgtcaacgagctggcccagattctccaagaagttgcaaactctgcgagcgatcttcttgcggtgagt

SEQ ID NO: 164 - protein, 261 aa, synthetic construct
  REGION 1..261: note = Description of Artificial Sequence: Synthetic polypeptide
MSAHFILIHSICHGAWLWYKLIPLLQSAGHNVTAIDLFASGSNPHQLEQIGTWRQYSEPLFTLIESIPEGKKVILVGEAGGGINIALAAEKYPEKVSALVFVNGLMPDIDHSPAFVVKKYSEVFTDWKDSIFSNYTYGNDTVTAVELGQRLLENIFSMSPIEDVELAKHRVRKGSFFLQDLDTLPNFTSEGYGSIRRVYVYGEEDRIFSRDFQLWQINNYKPDKVYCVPGADHKIMISRVNELAQILQEVANSASDLLAVS

SEQ ID NO: 165 - DNA, 783 bp, synthetic construct
  misc_feature 1..783: note = Description of Artificial Sequence: Synthetic polynucleotide
  source 1..783: mol_type = other DNA
atgagtgcgcattttattctgatccacagtatctgccatggcgcctggctgtggtataaactgatcccgttattacagtctgcaggtcataacgttacggcgattgatcttgtcgctagcgggagtaatcctcaccaactggaacagattggcacatggcgccagtactcagaaccattgttcaccctgatcgaatcgattccggaaggtaagaaagtcattctggtaggagaagcgggtggcggcatcaatattgcactggccgcggagaaatatccggagaaagtgagcgctctcgtctttgtgaacggtcttatgcccgatatcgatcacagtccagcgttcgtggtaaagaaatatagcgaagttttcactgactggaaagattcgatcttcagcaattatacctacggtaacgacacggtcaccgcggttgaattgggagatcgtactctggagaacatcttctccaattctccgattgaagatgtagaactggcgaaacatcgtgtccgcaaaggctccttttttctgcaagacttggataccctgccgaactttacgtcggaagggtatggttcaattcgtcgtgtgtatgtttacggcgaagaagaccaaatctttagccgcgattttcagttatggcaaattaataattataagcctgataaagtgtactgtgtaccgggtgctgaccacaagattatgatcagccgcgtcaacgagctggcccagattctccaagaagttgcaaactctgcgagcgatcttcttgcggtgagt

SEQ ID NO: 166 - protein, 261 aa, synthetic construct
  REGION 1..261: note = Description of Artificial Sequence: Synthetic polypeptide
MSAHFILIHSICHGAWLWYKLIPLLQSAGHNVTAIDLVASGSNPHQLEQIGTWRQYSEPLFTLIESIPEGKKVILVGEAGGGINIALAAEKYPEKVSALVFVNGLMPDIDHSPAFVVKKYSEVFTDWKDSIFSNYTYGNDTVTAVELGDRTLENIFSNSPIEDVELAKHRVRKGSFFLQDLDTLPNFTSEGYGSIRRVYVYGEEDQIFSRDFQLWQINNYKPDKVYCVPGADHKIMISRVNELAQILQEVANSASDLLAVS

SEQ ID NO: 167 - DNA, 780 bp, synthetic construct
  misc_feature 1..780: note = Description of Artificial Sequence: Synthetic polynucleotide
  source 1..780: mol_type = other DNA
atgagtgcgcattttattctgatccacagtatttgccatggcgcctggctgtggtataaactgatcccgttattacagtctgcaggtcataacgttacggcgattgatctttttgctagcgggagtaatcctcaccaactggaacagattggcacatggcgccagtactcagaaccattgttcaccctgatcgaatcgattcctaataagggtaaagtcattctggtaggagaagcgggtggcggcatcaatattgcactggccgcggagaaatatccggagaaagtgagcgctctcgtctttgtgaacggtcttatgcccgatatcgatcacagtccagcgttcgtggtaaagaaatatagcgaagttttcactgactggaaagattcgatcttcagcaattatacctacggtaacgacacggtcaccgcggttgaattgggagatcgtactctggagaacatcttctccaattctccgattgaagatgtagaactggcgaaacatcgtgtccgcaaaggctccttttttctgcaagacttggataccctgccgaactttacgtcggaagggtatggttcaattcgtcgtgtgtatgtttacggcgaagaagaccagatctttagccgcgattttcagttatggcaaattaataattataagcctgataaagtgtactgtgtaccgagtgctgaccacaagattatgatcagccgcgtcaacgagctggcccagattctccaagaagttgccaactctgcgagcgatcttgcggtgagt

SEQ ID NO: 168 - protein, 260 aa, synthetic construct
  REGION 1..260: note = Description of Artificial Sequence: Synthetic polypeptide
MSAHFILIHSICHGAWLWYKLIPLLQSAGHNVTAIDLFASGSNPHQLEQIGTWRQYSEPLFTLIESIPNKGKVILVGEAGGGINIALAAEKYPEKVSALVFVNGLMPDIDHSPAFVVKKYSEVFTDWKDSIFSNYTYGNDTVTAVELGDRTLENIFSNSPIEDVELAKHRVRKGSFFLQDLDTLPNFTSEGYGSIRRVYVYGEEDQIFSRDFQLWQINNYKPDKVYCVPSADHKIMISRVNELAQILQEVANSASDLAVS

SEQ ID NO: 169 - DNA, 780 bp, synthetic construct
  misc_feature 1..780: note = Description of Artificial Sequence: Synthetic polynucleotide
  source 1..780: mol_type = other DNA
atgagtgcgcattttattctgatccacagtatttgccatggcgcctggctgtggtataaactgatcccgttattacagtctgcaggtcataacgttacggcgattgatctttttgctagcgggagtaatcctcaccaactggaacagattggcacatggcgccagtactcagaaccattgttcaccctgatcgaatcgattccggaaggtaagaaagtcattctggtaggagaagcgggtggcggcatcaatattgcactggccgcggagaaatatccggagaaagtgagcgctctcgtctttgtgaacggtcttatgcccgatatcgatcacagtccagcgttcgtggtaaagaaatatagcgaagttttcactgactggaaagattcgatcttcagcaattatacctacggtaacgacacggtcaccgcggttgaattgggagatcgtactctggagaacatcttctccaattctccgattgaagatgtagaactggcgaaacatcgtgtccgcaaaggctccttttttctgcaagacttggataccctgccgaactttacgtcggaagggtatggttcaattcgtcgtgtgtatgtttacggcgaagaagaccagatctttagccgcgattttcagttatggcaaattaataattataagcctgataaagtgtactgtgtaccgagtgctgaccacaagattatgatcagccgcgtcaacgagctggcccagattctccaagaagttgcaaactctgcgagcgatcttgcggtgagt

SEQ ID NO: 170 - protein, 260 aa, synthetic construct
  REGION 1..260: note = Description of Artificial Sequence: Synthetic polypeptide
MSAHFILIHSICHGAWLWYKLIPLLQSAGHNVTAIDLFASGSNPHQLEQIGTWRQYSEPLFTLIESIPEGKKVILVGEAGGGINIALAAEKYPEKVSALVFVNGLMPDIDHSPAFVVKKYSEVFTDWKDSIFSNYTYGNDTVTAVELGDRTLENIFSNSPIEDVELAKHRVRKGSFFLQDLDTLPNFTSEGYGSIRRVYVYGEEDQIFSRDFQLWQINNYKPDKVYCVPSADHKIMISRVNELAQILQEVANSASDLAVS

SEQ ID NO: 171 - DNA, 771 bp, synthetic construct
  misc_feature 1..771: note = Description of Artificial Sequence: Synthetic polynucleotide
  source 1..771: mol_type = other DNA
atgagtgcgcattttattctgatccacagtatttgccatggcgcctggctgtggtataaactgatcccgttattacagtctgcaggtcataacgttacggcgattgatctttttgctagcgggagtaatcctcaccaactggaacagattggcacatggcgccagtactcagaaccattgttcaccctgatcgaatcgattccggaaggtaagaaagtcattctggtaggagaagcgggtggcggcatcaatattgcactggccgcggagaaatatccggagaaagtgagcgctctcgtctttgtgaacggtcttatgcccgatatcgatcacagtccagcgttcgtggtaaagaaatatagcgaagttttcactgactggaaagattcgatcttcagcaattatacctacggtaacgacacggtcaccgcggttgaattgggagatcgtactctggagaacatcttctccaattctccgattgaagatgtagaactggcgaaacatcgtgtccgcaaaggctccttttttctgcaagacttggataccctgccgaactttacgtcggaagggtatggttcaattcgtcgtgtgtatgtttacggcgaagaagaccagatctttagccgcgattttcagttatggcaaattaataattataagcctgataaagtgtactgtgtaccgagtgctgaccacaagattatgatcagccgcgtcaacgagctggcccagattctccaagaagttgcaaactctgcgagcgatctt

SEQ ID NO: 172 - protein, 257 aa, synthetic construct
  REGION 1..257: note = Description of Artificial Sequence: Synthetic polypeptide
MSAHFILIHSICHGAWLWYKLIPLLQSAGHNVTAIDLFASGSNPHQLEQIGTWRQYSEPLFTLIESIPEGKKVILVGEAGGGINIALAAEKYPEKVSALVFVNGLMPDIDHSPAFVVKKYSEVFTDWKDSIFSNYTYGNDTVTAVELGDRTLENIFSNSPIEDVELAKHRVRKGSFFLQDLDTLPNFTSEGYGSIRRVYVYGEEDQIFSRDFQLWQINNYKPDKVYCVPSADHKIMISRVNELAQILQEVANSASDL

SEQ ID NO: 173 - DNA, 759 bp, synthetic construct
  misc_feature 1..759: note = Description of Artificial Sequence: Synthetic polynucleotide
  source 1..759: mol_type = other DNA
atgagtgcgcattttattctgatccacagtatttgccatggcgcctggctgtggtataaactgatcccgttattacagtctgcaggtcataacgttacggcgattgatctttttgctagcgggagtaatcctcaccaactggaacagattggcacatggcgccagtactcagaaccattgttcaccctgatcgaatcgattccggaaggtaagaaagtcattctggtaggagaagcgggtggcggcatcaatattgcactggccgcggagaaatatccggagaaagtgagcgctctcgtctttgtgaacggtcttatgcccgatatcgatcacagtccagcgttcgtggtaaagaaatatagcgaagttttcactgactggaaagattcgatcttcagcaattatacctacggtaacgacacggtcaccgcggttgaattgggagatcgtactctggagaacatcttctccaattctccgattgaagatgtagaactggcgaaacatcgtgtccgcaaaggctccttttttctgcaagacttggataccctgccgaactttacgtcggaagggtatggttcaattcgtcgtgtgtatgtttacggcgaagaagaccagatctttagccgcgattttcagttatggcaaattaataattataagcctgataaagtgtactgtgtaccgagtgctgaccacaagattatgatcagccgcgtcaacgagctggcccagattctccaagaagttgcaaactct

SEQ ID NO: 174 - protein, 253 aa, synthetic construct
  REGION 1..253: note = Description of Artificial Sequence: Synthetic polypeptide
MSAHFILIHSICHGAWLWYKLIPLLQSAGHNVTAIDLFASGSNPHQLEQIGTWRQYSEPLFTLIESIPEGKKVILVGEAGGGINIALAAEKYPEKVSALVFVNGLMPDIDHSPAFVVKKYSEVFTDWKDSIFSNYTYGNDTVTAVELGDRTLENIFSNSPIEDVELAKHRVRKGSFFLQDLDTLPNFTSEGYGSIRRVYVYGEEDQIFSRDFQLWQINNYKPDKVYCVPSADHKIMISRVNELAQILQEVANS

SEQ ID NO: 175 - DNA, 765 bp, synthetic construct
  misc_feature 1..765: note = Description of Artificial Sequence: Synthetic polynucleotide
  source 1..765: mol_type = other DNA
atgagtgcgcattttattctgatccacagtatttgccatggcgcctggctgtggtataaactgatcccgttattacagtctgcaggtcataacgttacggcgattgatctttttgctagcgggagtaatcctcaccaactggaacagattggcacatggcgccagtactcagaaccattgttcaccctgatcgaatcgattccggaaggtaagaaagtcattctggtaggagaagcgggtggcggcatcaatattgcactggccgcggagaaatatccggagaaagtgagcgctctcgtctttgtgaacggtcttatgcccgatatcgatcacagtccagcgttcgtggtaaagaaatatagcgaagttttcactgactggaaagattcgatcttcagcaattatacctacggtaacgacacggtcaccgcggttgaattgggagatcgtactctggagaacatcttctccaattctccgattgaagatgtagaactggcgaaacatcgtgtccgcaaaggctccttttttctgcaagacttggataccctgccgaactttacgtcggaagggtatggttcaattcgtcgtgtgtatgtttacggcgaagaagaccagatctttagccgcgattttcagttatggcaaattaataattataagcctgataaagtgtactgtgtaccgagtgctgaccacaagattatgatcagccgcgtcaacgagctggcccagattctccaagaagttgcaaactctgcgagc

SEQ ID NO: 176 - protein, 255 aa, synthetic construct
  REGION 1..255: note = Description of Artificial Sequence: Synthetic polypeptide
MSAHFILIHSICHGAWLWYKLIPLLQSAGHNVTAIDLFASGSNPHQLEQIGTWRQYSEPLFTLIESIPEGKKVILVGEAGGGINIALAAEKYPEKVSALVFVNGLMPDIDHSPAFVVKKYSEVFTDWKDSIFSNYTYGNDTVTAVELGDRTLENIFSNSPIEDVELAKHRVRKGSFFLQDLDTLPNFTSEGYGSIRRVYVYGEEDQIFSRDFQLWQINNYKPDKVYCVPSADHKIMISRVNELAQILQEVANSAS

SEQ ID NO: 177 - DNA, 777 bp, synthetic construct
  misc_feature 1..777: note = Description of Artificial Sequence: Synthetic polynucleotide
  source 1..777: mol_type = other DNA
atgagtgcgcattttattctgatccacagtatttgccatggcgcctggctgtggtataaactgatcccgttattacagtctgcaggtcataacgttacggcgattgatctttttgctagcgggagtaatcctcaccaactggaacagattggcacatggcgccagtactcagaaccattgttcaccctgatcgaatcgattccggaaggtaagaaagtcattctggtaggagaagcgggtggcggcatcaatattgcactggccgcggagaaatatccggagaaagtgagcgctctcgtctttgtgaacggtcttatgcccgatatcgatcacagtccagcgttcgtggtaaagaaatatagcgaagttttcactgactggaaagattcgatcttcagcaattatacctacggtaacgacacggtcaccgcggttgaattgggagatcgtactctggagaacatcttctccaattctccgattgaagatgtagaactggcgaaacatcgtgtccgcaaaggctccttttttctgcaagacttggataccctgccgaactttacgtcggaagggtatggttcaattcgtcgtgtgtatgtttacggcgaagaagaccagatctttagccgcgattttcagttatggcaaattaataattataagcctgataaagtgtactgtgtaccgagtgctgaccacaagattatgatcagccgcgtcaacgagctggcccagattctccaagaagttgcaaactctgcgagcgataacttgcgg

SEQ ID NO: 178 - protein, 259 aa, synthetic construct
  REGION 1..259: note = Description of Artificial Sequence: Synthetic polypeptide
MSAHFILIHSICHGAWLWYKLIPLLQSAGHNVTAIDLFASGSNPHQLEQIGTWRQYSEPLFTLIESIPEGKKVILVGEAGGGINIALAAEKYPEKVSALVFVNGLMPDIDHSPAFVVKKYSEVFTDWKDSIFSNYTYGNDTVTAVELGDRTLENIFSNSPIEDVELAKHRVRKGSFFLQDLDTLPNFTSEGYGSIRRVYVYGEEDQIFSRDFQLWQINNYKPDKVYCVPSADHKIMISRVNELAQILQEVANSASDNLR

SEQ ID NO: 179 - DNA, 783 bp, synthetic construct
  misc_feature 1..783: note = Description of Artificial Sequence: Synthetic polynucleotide
  source 1..783: mol_type = other DNA
atgagtgcgcattttattctgatccacagtatttgccatggcgcctggctgtggtataaactgatcccgttattacagtctgcaggtcatactgttacggcgattgatctttttgctagcgggagtaatcctcaccaactggaacagattggcacatggcgccagtactcagaaccattgttcaccctgatcgaatcgattccggaaggtaagaaagtcattctggtaggagaagcgggtggcggcatcaatattgcactggccgcggagaaatatccggagaaagtgagcgctctcgtctttgtgaacggtcttatgcccgatatcgatcacagtccagcgttcgtggtaaagaaatatagcgaagttttcactgactggaaagattcgatcttcagcaattatacctacggtaacgacacggtcaccgcggttgaattgggagatcgtactctggagaacatcttctccaattctccgattgaagatgtagaactggcgaaacatcgtgtccgcaaaggctccttttttctgcaagacttggataccctgccgaactttacgtcggaagggtatggttcaattcgtcgtgtgtatgtttacggcgaagaagaccagatctttagccgcgattttcagttatggcaaattaataattataagcctgataaagtgtactgtgtaccgagtgctgaccacaagattatgatcagccgcgtcaacgagctggcccagattctccaagaagttgcaaactctgcgagcgatcttcttgcggtgagt

SEQ ID NO: 180 - protein, 261 aa, synthetic construct
  REGION 1..261: note = Description of Artificial Sequence: Synthetic polypeptide
MSAHFILIHSICHGAWLWYKLIPLLQSAGHTVTAIDLFASGSNPHQLEQIGTWRQYSEPLFTLIESIPEGKKVILVGEAGGGINIALAAEKYPEKVSALVFVNGLMPDIDHSPAFVVKKYSEVFTDWKDSIFSNYTYGNDTVTAVELGDRTLENIFSNSPIEDVELAKHRVRKGSFFLQDLDTLPNFTSEGYGSIRRVYVYGEEDQIFSRDFQLWQINNYKPDKVYCVPSADHKIMISRVNELAQILQEVANSASDLLAVS

SEQ ID NO: 181 - DNA, 783 bp, synthetic construct
  misc_feature 1..783: note = Description of Artificial Sequence: Synthetic polynucleotide
  source 1..783: mol_type = other DNA
atgagtgcgcattttattctgatccacagtatttgccatggcgcctggctgtggtataaactgatcccgttattacagtctgcaggtcataacgttacggcgattgatctttttgctagcgggagtaatcctcaccaactggaacagattggcacatggcgccagtactcagaaccattgttcaccctgatcgaatcgattccggaaggtaagaaagtcattctggtaggagaagcgggtggcggcatcaatattgcactggccgcggagaaatatccggagaaagtgagcgctctcgtctttgtgaacggtcttatgcccgatatcgatcacagtccagcgttcgtggtaaagaaatatagcgaagttttcactgactggaaagattcgatcttcagcaattatacctacggtaacgacacggtcaccgcggttgaattgggagatcgtactctggagaacatcttctccaattctccgattgaagatgtagaactggcgaaacatcgtgtccgcaaaggctccttttttctgcaagacttggataccctgccgaactttacgtcggaagggtatggttcaattcgtcgtgtgtatgtttacggcgaagaagaccagatctttagccgcgattttcagttatggcaaattaataattataagcctgataaagtgtactgtgtaccgagtgctgaccacaagattatgatcagccgcgtcaacgagctggcccagattctccaagaagttgcaaactctgcgagcgatcttgctgcggtgagt

SEQ ID NO: 182 - protein, 261 aa, synthetic construct
  REGION 1..261: note = Description of Artificial Sequence: Synthetic polypeptide
MSAHFILIHSICHGAWLWYKLIPLLQSAGHNVTAIDLFASGSNPHQLEQIGTWRQYSEPLFTLIESIPEGKKVILVGEAGGGINIALAAEKYPEKVSALVFVNGLMPDIDHSPAFVVKKYSEVFTDWKDSIFSNYTYGNDTVTAVELGDRTLENIFSNSPIEDVELAKHRVRKGSFFLQDLDTLPNFTSEGYGSIRRVYVYGEEDQIFSRDFQLWQINNYKPDKVYCVPSADHKIMISRVNELAQILQEVANSASDLAAVS

SEQ ID NO: 183 - DNA, 783 bp, synthetic construct
  misc_feature 1..783: note = Description of Artificial Sequence: Synthetic polynucleotide
  source 1..783: mol_type = other DNA
atgagtgcgcattttattctgatccacagtatttgccatggcgcctggctgtggtataaactgatcccgttattacagtctgcaggtcataacgttacggcgattgatctttttgctagcgggagtaatcctcaccaactggaacagattggcacatggcgccagtactcagaaccattgttcaccctgatcgaatcgattccggaaggtaagaaagtcattctggtaggagaagcgggtggcggcatcaatattgcactggccgcggagaaatatccggagaaagtgagcgctctcgtctttgtgaacggtcttatgcccgatatcgatcacagtccagcgttcgtggtaaagaaatatagcgaagttttcactgactggaaagattcgatcttcagcaattatacctacggtaacgacacggtcaccgcggttgaattgggagatcgtactctggagaacatcttctccaattctccgattgaagatgtagaactggcgaaacatcgtgtccgcaaaggctccttttttctgcaagacttggataccctgccgaactttacgtcggaagggtatggttcaattcgtcgtgtgtatgtttacggcgaagaagaccagatctttagccgcgattttcagttatggcaaattaataattataagcctgataaagtgtactgtgtaccgagtgctgaccacaagattatgatcagccgcgtcaacgagctggcccagattctccaagaagttgcaaactctgcgagcgatcttcttacggtgagt

SEQ ID NO: 184 - protein, 261 aa, synthetic construct
  REGION 1..261: note = Description of Artificial Sequence: Synthetic polypeptide
MSAHFILIHSICHGAWLWYKLIPLLQSAGHNVTAIDLFASGSNPHQLEQIGTWRQYSEPLFTLIESIPEGKKVILVGEAGGGINIALAAEKYPEKVSALVFVNGLMPDIDHSPAFVVKKYSEVFTDWKDSIFSNYTYGNDTVTAVELGDRTLENIFSNSPIEDVELAKHRVRKGSFFLQDLDTLPNFTSEGYGSIRRVYVYGEEDQIFSRDFQLWQINNYKPDKVYCVPSADHKIMISRVNELAQILQEVANSASDLLTVS

SEQ ID NO: 185 - DNA, 783 bp, synthetic construct
  misc_feature 1..783: note = Description of Artificial Sequence: Synthetic polynucleotide
  source 1..783: mol_type = other DNA
atgagtgcgcattttattctgatccacagtatttgccatggcgcctggctgtggtataaactgatcccgttattacagtctgcaggtcataacgttacggcgattgatctttttgctagcgggagtaatcctcaccaactggaacagattggcacatggcgccagtactcagaaccattgttcaccctgatcgaatcgattccggaaggtaagaaagtcattctggtaggagaagcgggtggcggcatcaatattgcactggccgcggagaaatatccggagaaagtgagcgctctcgtctttgtgaacggtcttatgcccgatatcgatcacagtccagcgttcgtggtaaagaaatatagcgaagttttcactgactggaaagattcgatcttcagcaattatacctacggtaacgacacggtcaccgcggttgaattgggagatcgtactctggagaacatcttctccaattctccgattgaagatgtagaactggcgaaacatcgtgtccgcaaaggctccttttttctgcaagacttggataccctgccgaactttacgtcggaagggtatggttcaattcgtcgtgtgtatgtttacggcgaagaagacagtatctttagccgcgattttcagttatggcaaattaataattataagcctgataaagtgtactgtgtaccgagtgctgaccacaagattatgatcagccgcgtcaacgagctggcccagattctccaagaagttgcaaactctgcgagcgatcttcttgcggtgagt

SEQ ID NO: 186 - protein, 261 aa, synthetic construct
  REGION 1..261: note = Description of Artificial Sequence: Synthetic polypeptide
MSAHFILIHSICHGAWLWYKLIPLLQSAGHNVTAIDLFASGSNPHQLEQIGTWRQYSEPLFTLIESIPEGKKVILVGEAGGGINIALAAEKYPEKVSALVFVNGLMPDIDHSPAFVVKKYSEVFTDWKDSIFSNYTYGNDTVTAVELGDRTLENIFSNSPIEDVELAKHRVRKGSFFLQDLDTLPNFTSEGYGSIRRVYVYGEEDSIFSRDFQLWQINNYKPDKVYCVPSADHKIMISRVNELAQILQEVANSASDLLAVS

SEQ ID NO: 187 - DNA, 783 bp, synthetic construct
  misc_feature 1..783: note = Description of Artificial Sequence: Synthetic polynucleotide
  source 1..783: mol_type = other DNA
atgagtgcgcattttattctgatccacagtatttgccatggcgcctggctgtggtataaactgatcccgttattacagtctgcaggtcataacgttacggcgattgatctttttgctagcgggagtaatcctcaccaactggaacagattggcacatggcgccagtactcagaaccattgttcaccctgatcgaatcgattccggaaggtaagaaagtcattctggtaggagaagcgggtggcggcatcaatattgcactggccgcggagaaatatccggagaaagtgagcgctctcgtctttgtgaacggtcttatgcccgatatcagtcacagtccagcgttcgtggtaaagaaatatagcgaagttttcactgactggaaagattcgatcttcagcaattatacctacggtaacgacacggtcaccgcggttgaattgggagatcgtactctggagaacatcttctccaattctccgattgaagatgtagaactggcgaaacatcgtgtccgcaaaggctccttttttctgcaagacttggataccctgccgaactttacgtcggaagggtatggttcaattcgtcgtgtgtatgtttacggcgaagaagaccagatctttagccgcgattttcagttatggcaaattaataattataagcctgataaagtgtactgtgtaccgagtgctgaccacaagattatgatcagccgcgtcaacgagctggcccagattctccaagaagttgcaaactctgcgagcgatcttcttgcggtgagt

SEQ ID NO: 188 - protein, 261 aa, synthetic construct
  REGION 1..261: note = Description of Artificial Sequence: Synthetic polypeptide
MSAHFILIHSICHGAWLWYKLIPLLQSAGHNVTAIDLFASGSNPHQLEQIGTWRQYSEPLFTLIESIPEGKKVILVGEAGGGINIALAAEKYPEKVSALVFVNGLMPDISHSPAFVVKKYSEVFTDWKDSIFSNYTYGNDTVTAVELGDRTLENIFSNSPIEDVELAKHRVRKGSFFLQDLDTLPNFTSEGYGSIRRVYVYGEEDQIFSRDFQLWQINNYKPDKVYCVPSADHKIMISRVNELAQILQEVANSASDLLAVS

SEQ ID NO: 189 - DNA, 783 bp, synthetic construct
  misc_feature 1..783: note = Description of Artificial Sequence: Synthetic polynucleotide
  source 1..783: mol_type = other DNA
atgagtgcgcattttattctgatccacagtatttgccatggcgcctggctgtggtataaactgatcccgttattacagtctgcaggtcataacgttacggcgattgatctttttgctagcgggagtaatcctcaccaactggaacagattggcacatggcgccagtactcagaaccattgttcaccctgatcgaatcgattccggaaggtaagaaagtcattctggtaggagaagcgggtggcggcatcaatattgcactggccgcggagaaatatccggagaaagtgagcgctctcgtctttgtgaacggtcttatgcccgatatcgatcacagtccagcgttcgtggtaaagaaatatagcgaagttttcactgactggaaagattcgatcttcagcaattatacctacggtaacgacacggtcaccgcggttaagttgggagatcgtactctggagaacatcttctccaattctccgattgaagatgtagaactggcgaaacatcgtgtccgcaaaggctccttttttctgcaagacttggataccctgccgaactttacgtcggaagggtatggttcaattcgtcgtgtgtatgtttacggcgaagaagaccagatctttagccgcgattttcagttatggcaaattaataattataagcctgataaagtgtactgtgtaccgagtgctgaccacaagattatgatcagccgcgtcaacgagctggcccagattctccaagaagttgcaaactctgcgagcgatcttcttgcggtgagt

SEQ ID NO: 190 - protein, 261 aa, synthetic construct
  REGION 1..261: note = Description of Artificial Sequence: Synthetic polypeptide
MSAHFILIHSICHGAWLWYKLIPLLQSAGHNVTAIDLFASGSNPHQLEQIGTWRQYSEPLFTLIESIPEGKKVILVGEAGGGINIALAAEKYPEKVSALVFVNGLMPDIDHSPAFVVKKYSEVFTDWKDSIFSNYTYGNDTVTAVKLGDRTLENIFSNSPIEDVELAKHRVRKGSFFLQDLDTLPNFTSEGYGSIRRVYVYGEEDQIFSRDFQLWQINNYKPDKVYCVPSADHKIMISRVNELAQILQEVANSASDLLAVS

SEQ ID NO: 191 - DNA, 777 bp, synthetic construct
  misc_feature 1..777: note = Description of Artificial Sequence: Synthetic polynucleotide
  source 1..777: mol_type = other DNA
atgagtgcgcattttattctgatccacagtatttgccatggcgcctggctgtggtataaactgatcccgttattacagtctgcaggtcataacgttacggcgattgatctttttgctagcgggagtaatcctcaccaactggaacagattggcacatggcgccagtactcagaaccattgttcaccctgatcgaatcgattccggaaggtaagaaagtcattctggtaggagaagcgggtggcggcatcaatattgcactggccgcggagaaatatccggagaaagtgagcgctctcgtctttgtgaacggtcttatgcccgatatcgatcacagtccagcgttcgtggtaaagaaatatagcgaagttttcactgactggaaagattcgatcttcagcaattatacctacggtaacgacacggtcaccgcggttgaattgggagatcgtactctggagaacatcttctccaattctccgattgaagatgtagaactggcgaaacatcgtgtccgcaaaggctccttttttctgcaagacttggataccctgccgaactttacgtcggaagggtatggttcaattcgtcgtgtgtatgtttacggcgaagaagaccagatctttagccgcgattttcagttatggcaaattaataattataagcctgataaagtgtactgtgtaccgagtgctgaccacaagattatgatcagccgcgtcaacgagctggcccagattctccaagaagttgcaaactctgcgagcgatcttcttgcg

SEQ ID NO: 192 - protein, 259 aa, synthetic construct
  REGION 1..259: note = Description of Artificial Sequence: Synthetic polypeptide
MSAHFILIHSICHGAWLWYKLIPLLQSAGHNVTAIDLFASGSNPHQLEQIGTWRQYSEPLFTLIESIPEGKKVILVGEAGGGINIALAAEKYPEKVSALVFVNGLMPDIDHSPAFVVKKYSEVFTDWKDSIFSNYTYGNDTVTAVELGDRTLENIFSNSPIEDVELAKHRVRKGSFFLQDLDTLPNFTSEGYGSIRRVYVYGEEDQIFSRDFQLWQINNYKPDKVYCVPSADHKIMISRVNELAQILQEVANSASDLLA

SEQ ID NO: 193 - DNA, 783 bp, synthetic construct
  misc_feature 1..783: note = Description of Artificial Sequence: Synthetic polynucleotide
  source 1..783: mol_type = other DNA
atgagtgcgcattttattctgatccacagtatttgccatggcgcctggctgtggtataaactgatcccgttattacagtctgcaggtcataacgttacggcgattgatctttttgctagcgggagtaatcctcaccaactggaacagattggcacatggcgccagtactcagaaccattgttcaccctgatcgaatcgattccggaaggtaagaaagtcattctggtaggagaagcgggtggcggcatcaatattgcactggccgcggagaaatatccggagaaagtgagcgctctcgtctttgtgaacggtcttatgcccgatatcgatcacagtccagcgttcgtggtaaagaaatatagcgaagttttcactgactggaaagattcgatcttcagcaattatacctacggtaacgacacggtcggggcggttgaattgggagatcgtactctggagaacatcttctccaattctccgattgaagatgtagaactggcgaaacatcgtgtccgcaaaggctccttttttctgcaagacttggataccctgccgaactttacgtcggaagggtatggttcaattcgtcgtgtgtatgtttacggcgaagaagaccagatctttagccgcgattttcagttatggcaaattaataattataagcctgataaagtgtactgtgtaccgagtgctgaccacaagattatgatcagccgcgtcaacgagctggcccagattctccaagaagttgcaaactctgcgagcgatcttcttgcggtgagt

SEQ ID NO: 194 - protein, 261 aa, synthetic construct
  REGION 1..261: note = Description of Artificial Sequence: Synthetic polypeptide
MSAHFILIHSICHGAWLWYKLIPLLQSAGHNVTAIDLFASGSNPHQLEQIGTWRQYSEPLFTLIESIPEGKKVILVGEAGGGINIALAAEKYPEKVSALVFVNGLMPDIDHSPAFVVKKYSEVFTDWKDSIFSNYTYGNDTVGAVELGDRTLENIFSNSPIEDVELAKHRVRKGSFFLQDLDTLPNFTSEGYGSIRRVYVYGEEDQIFSRDFQLWQINNYKPDKVYCVPSADHKIMISRVNELAQILQEVANSASDLLAVS

SEQ ID NO: 195 - DNA, 783 bp, synthetic construct
  misc_feature 1..783: note = Description of Artificial Sequence: Synthetic polynucleotide
  source 1..783: mol_type = other DNA
atgagtgcgcattttattctgatccacagtatttgccatggcgcctggctgtggtataaactgatcccgttattacagtctgcaggtcataacgttacggcgattgatctttttgctagcgggagtaatcctcaccaactggaacagattggcacatggcgccagtactcagaaccattgttcaccctgatcgaatcgattccggaaggtaagaaagtcattctggtaggagaagcgggtggcggcatcaatattgcactggccgcggagaaatatccggagaaagtgagcgctctcgtctttgtgaacggtcttatgcccgatatcgatcacagtccagcgttcgtggtaaagaaatatagcgaagttttcactgactggaaagattcgatcttcagcaattatacctacggtaacgacacggtcaccgcggttgaattgggagatcgtactctggagaacatcttctccaattctccgattgaagatgtagaactggcgaaacatcgtgtccgcaaaggctccttttttctgcaagacttggataccctgccgaactttacgtcggaagggtatggttcaattcgtcgtgtgtatgtttacggcgaagaagaccagatctttagccgcgattttcagttatggcaaattaataattataagcctgataaagtgtactgtgtaccgagtgctgaccacaagattatgatcagccgcgtcaacgagctggcccagattctccaagaagttgcaaactctgcgagcgatcttcttgcggcgagt

SEQ ID NO: 196 - protein, 261 aa, synthetic construct
  REGION 1..261: note = Description of Artificial Sequence: Synthetic polypeptide
MSAHFILIHSICHGAWLWYKLIPLLQSAGHNVTAIDLFASGSNPHQLEQIGTWRQYSEPLFTLIESIPEGKKVILVGEAGGGINIALAAEKYPEKVSALVFVNGLMPDIDHSPAFVVKKYSEVFTDWKDSIFSNYTYGNDTVTAVELGDRTLENIFSNSPIEDVELAKHRVRKGSFFLQDLDTLPNFTSEGYGSIRRVYVYGEEDQIFSRDFQLWQINNYKPDKVYCVPSADHKIMISRVNELAQILQEVANSASDLLAAS

SEQ ID NO: 197 - DNA, 783 bp, synthetic construct
  misc_feature 1..783: note = Description of Artificial Sequence: Synthetic polynucleotide
  source 1..783: mol_type = other DNA
atgagtgcgcattttattctgatccacagtatttgccatggcgcctggctgtggtataaactgatcccgttattacagtctgcaggtcataacgttacggcgattgatctttttgctagcgggagtaatcctcaccaactggaacagattggcacatggcgccagtactcagaaccattgttcaccctgatcgaatcgattccggaaggtaagaaagtcattctggtaggagaagcgggtggcggcatcaatattgcactggccgcggagaaatatccggagaaagtgagcgctctcgtctttgtgaacggtcttatgcccgatatcgatcacagtccagcgttcgtggtaaagaaatatagcgaagttttcactgactggaaagattcgatcttcagcaattatacctacggtaacgacacggtcaccgcggttgaattgggagatcgtactctggagaacatcttctccaattctccgattgaagatgtagaactggcgaaacatcgtgtccgcaaaggctccttttttctgcaagacttggataccctgccgaactttacgacggaagggtatggttcaattcgtcgtgtgtatgtttacggcgaagaagaccagatctttagccgcgattttcagttatggcaaattaataattataagcctgataaagtgtactgtgtaccgagtgctgaccacaagattatgatcagccgcgtcaacgagctggcccagattctccaagaagttgcaaactctgcgagcgatcttcttgcggtgagt

SEQ ID NO: 198 - protein, 261 aa, synthetic construct
  REGION 1..261: note = Description of Artificial Sequence: Synthetic polypeptide
MSAHFILIHSICHGAWLWYKLIPLLQSAGHNVTAIDLFASGSNPHQLEQIGTWRQYSEPLFTLIESIPEGKKVILVGEAGGGINIALAAEKYPEKVSALVFVNGLMPDIDHSPAFVVKKYSEVFTDWKDSIFSNYTYGNDTVTAVELGDRTLENIFSNSPIEDVELAKHRVRKGSFFLQDLDTLPNFTTEGYGSIRRVYVYGEEDQIFSRDFQLWQINNYKPDKVYCVPSADHKIMISRVNELAQILQEVANSASDLLAVS

SEQ ID NO: 199 - DNA, 783 bp, synthetic construct
  misc_feature 1..783: note = Description of Artificial Sequence: Synthetic polynucleotide
  source 1..783: mol_type = other DNA
atgagtgcgcattttattctgatccacagtatttgccatggcgcctggctgtggtataaactgatcccgttattacagtctgcaggtcataacgttacggcgattgatctttttgctagcgggagtaatcctcaccaactggaacagattggcacatggcgccagtactcagaaccattgttcaccctgatcgaatcgattccggaaggtaagaaagtcattctggtaggagaagcgggtggcggcatcaatattgcactggccgcggagaaatatccggagaaagtgagcgctctcgtctttgtgaacggtcttatgcccgatatcgatcacagtccagcgttcgtggtaaagaaatatagcgaagttttcactgactggaaagattcgatcttcagcaattatacctacggtaacgacacggtcaccgcggttgaattgggagatcgtactctggagaacatcttctccaattctccgattgaagatgtagaactggcgaaacatcgtgtccgcaaaggctccttttttctgcaagacttggataccctgccgaactttacgtcgggggggtatggttcaattcgtcgtgtgtatgtttacggcgaagaagaccagatctttagccgcgattttcagttatggcaaattaataattataagcctgataaagtgtactgtgtaccgagtgctgaccacaagattatgatcagccgcgtcaacgagctggcccagattctccaagaagttgcaaactctgcgagcgatcttcttgcggtgagt

SEQ ID NO: 200 - protein, 261 aa, synthetic construct
  REGION 1..261: note = Description of Artificial Sequence: Synthetic polypeptide
MSAHFILIHSICHGAWLWYKLIPLLQSAGHNVTAIDLFASGSNPHQLEQIGTWRQYSEPLFTLIESIPEGKKVILVGEAGGGINIALAAEKYPEKVSALVFVNGLMPDIDHSPAFVVKKYSEVFTDWKDSIFSNYTYGNDTVTAVELGDRTLENIFSNSPIEDVELAKHRVRKGSFFLQDLDTLPNFTSGGYGSIRRVYVYGEEDQIFSRDFQLWQINNYKPDKVYCVPSADHKIMISRVNELAQILQEVANSASDLLAVS

SEQ ID NO: 201 - DNA, 783 bp, synthetic construct
  misc_feature 1..783: note = Description of Artificial Sequence: Synthetic polynucleotide
  source 1..783: mol_type = other DNA
atgagtgcgcattttattctgatccacagtatttgccatggcgcctggctgtggtataaactgatcccgttattacagtctgcaggtcataacgttacggcgattgatctttttgctagcgggagtaatcctcaccaactggaacagattggcacatggcgccagtactcagaaccattgttcaccctgatcgaatcgattccggaaggtaagaaagtcattctggtaggagaagcgggtggcggcatcaatattgcactggccgcggagaaatatccggagaaagtgagcgctctcgtctttgtgaacggtcttatgcccgatatcgatcacagtccagcgttcgtggtaaagaaatatagcgaagttttcactgactggaaagattcgatcttcagcaattatacctacggtaacgacacggtcaccgcggttgaattgggagatcgtactctggagaacatcttctccaattctccgattgaagatgtagaactggcgaaacatcgtgtccgcaaaggctccttttttctgcaagacttggataccctgccgaactttacgtcggaagggtatggttcaattcgtcgtgtgtatgtttacggcgaagaagaccagatctttagccgcgattttcagttatggcaaattaataattataagcctgataaagtgtactgtgtaccgagtgctgaccacaagattatgatcagccgcgtcaacgagctggcccagattctccaagaagttgcaaactctgcgagcgatgggcttgcggtgagt

SEQ ID NO: 202 - protein, 261 aa, synthetic construct
  REGION 1..261: note = Description of Artificial Sequence: Synthetic polypeptide
MSAHFILIHSICHGAWLWYKLIPLLQSAGHNVTAIDLFASGSNPHQLEQIGTWRQYSEPLFTLIESIPEGKKVILVGEAGGGINIALAAEKYPEKVSALVFVNGLMPDIDHSPAFVVKKYSEVFTDWKDSIFSNYTYGNDTVTAVELGDRTLENIFSNSPIEDVELAKHRVRKGSFFLQDLDTLPNFTSEGYGSIRRVYVYGEEDQIFSRDFQLWQINNYKPDKVYCVPSADHKIMISRVNELAQILQEVANSASDGLAVS

SEQ ID NO: 203 - DNA, 783 bp, synthetic construct
  misc_feature 1..783: note = Description of Artificial Sequence: Synthetic polynucleotide
  source 1..783: mol_type = other DNA
atgagtgcgcattttattctgatccacagtatttgccatggcgcctggctgtggtataaactgatcccgttattacagtctgcaggtcataacgttacggcgattgatctttttgctagcgggagtaatcctcaccaactggaacagattggcacatggcgccagtactcagaaccattgttcaccctgatcgaatcgattccggaaggtaagaaagtcattctggtaggagaagcgggtggcggcatcaatattgcactggccgcggagaaatatccggagaaagtgagcgctctcgtctttgtgaacggtcttatgcccgatatcgatcacagtccagcgttcgtggtaaagaaatatagcgaagttttcactgactggaaagattcgatcttcagcaattatacctacggtaacgacacggtcaccgcggttgaattgggagatcgtactctggagaacatcttctccaattctccgattgaagatgtagaactggcgaaacatcgtgtccgcaaaggctccttttttctgcaagacttggataccctgccgaactttacgtcgagggggtatggttcaattcgtcgtgtgtatgtttacggcgaagaagaccagatctttagccgcgattttcagttatggcaaattaataattataagcctgataaagtgtactgtgtaccgagtgctgaccacaagattatgatcagccgcgtcaacgagctggcccagattctccaagaagttgcaaactctgcgagcgatcttcttgcggtgagt

SEQ ID NO: 204 - protein, 261 aa, synthetic construct
  REGION 1..261: note = Description of Artificial Sequence: Synthetic polypeptide
MSAHFILIHSICHGAWLWYKLIPLLQSAGHNVTAIDLFASGSNPHQLEQIGTWRQYSEPLFTLIESIPEGKKVILVGEAGGGINIALAAEKYPEKVSALVFVNGLMPDIDHSPAFVVKKYSEVFTDWKDSIFSNYTYGNDTVTAVELGDRTLENIFSNSPIEDVELAKHRVRKGSFFLQDLDTLPNFTSRGYGSIRRVYVYGEEDQIFSRDFQLWQINNYKPDKVYCVPSADHKIMISRVNELAQILQEVANSASDLLAVS

SEQ ID NO: 205 - DNA, 783 bp, synthetic construct
  misc_feature 1..783: note = Description of Artificial Sequence: Synthetic polynucleotide
  source 1..783: mol_type = other DNA
atgagtgcgcattttattctgatccacagtatttgccatggcgcctggctgtggtataaactgatcccgttattacagtctgcaggtcataacgttacggcgattgatctttttgctagcgggagtaatcctcaccaactggaacagattggcacatggcgccagtactcagaaccattgttcaccctgatcgaatcgattccggaaggtaagaaagtcattctggtaggagaagcgggtggcggcatcaatattgcactggccgcggagaaatatccggagaaagtgagcgctctcgtctttgtgaacggtcttatgcccgatatcgatcacagtccagcgttcgtggtaaagaaatatagcgaagttttcactgagtggaaagattcgatcttcagcaattatacctacggtaacgacacggtcaccgcggttgaattgggagatcgtactctggagaacatcttctccaattctccgattgaagatgtagaactggcgaaacatcgtgtccgcaaaggctccttttttctgcaagacttggataccctgccgaactttacgtcggaagggtatggttcaattcgtcgtgtgtatgtttacggcgaagaagaccagatctttagccgcgattttcagttatggcaaattaataattataagcctgataaagtgtactgtgtaccgagtgctgaccacaagattatgatcagccgcgtcaacgagctggcccagattctccaagaagttgcaaactctgcgagcgatcttcttgcggtgagt

SEQ ID NO: 206 - protein, 261 aa, synthetic construct
  REGION 1..261: note = Description of Artificial Sequence: Synthetic polypeptide
MSAHFILIHSICHGAWLWYKLIPLLQSAGHNVTAIDLFASGSNPHQLEQIGTWRQYSEPLFTLIESIPEGKKVILVGEAGGGINIALAAEKYPEKVSALVFVNGLMPDIDHSPAFVVKKYSEVFTEWKDSIFSNYTYGNDTVTAVELGDRTLENIFSNSPIEDVELAKHRVRKGSFFLQDLDTLPNFTSEGYGSIRRVYVYGEEDQIFSRDFQLWQINNYKPDKVYCVPSADHKIMISRVNELAQILQEVANSASDLLAVS

SEQ ID NO: 207 - DNA, 783 bp, synthetic construct
  misc_feature 1..783: note = Description of Artificial Sequence: Synthetic polynucleotide
  source 1..783: mol_type = other DNA
atgagtgcgcattttattctgatccacagtatttgccatggcgcctggctgtggtataaactgatcccgttattacagtctgcaggtcataacgttacggcgattgatctttttgctagcgggagtaatcctcaccaactggaacagattggcacatggcgccagtactcagaaccattgttcaccctgatcgaatcgattccggaaggtaagaaagtcattctggtaggagaagcgggtggcggcatcaatattgcactggccgcggagaaatatccggagaaagtgagcgctctcgtctttgtgaacggtcttatgcccgatatcgatcacagtccagcgttcgtggtaaagaaatatagcgaagttttcactgactggaaagattcgatcttcagcaattatacctacggtaacgacacggtcaccgcggttgaattgggagatcgtactctggagaacatcttctccaattctccgattgaagatgtagaactggcgaaacatcgtgtccgcaaaggctccttttttctgcaagacttggataccctgccgaactttacgtcggaagggtatggttcaattcgtcgtgtgtatgtttacggcgaagaagaccagatctttagccgcgattttcagttatggcaaattaataattataagcctgataaagtgtactgtgtaccgagtgctgaccacaagattatgatcagccgcgtcaacgagctggcccagattctccaagaagttgcaaactctgcgccggatcttcttgcggtgagt

SEQ ID NO: 208 - protein, 261 aa, synthetic construct
  REGION 1..261: note = Description of Artificial Sequence: Synthetic polypeptide
MSAHFILIHSICHGAWLWYKLIPLLQSAGHNVTAIDLFASGSNPHQLEQIGTWRQYSEPLFTLIESIPEGKKVILVGEAGGGINIALAAEKYPEKVSALVFVNGLMPDIDHSPAFVVKKYSEVFTDWKDSIFSNYTYGNDTVTAVELGDRTLENIFSNSPIEDVELAKHRVRKGSFFLQDLDTLPNFTSEGYGSIRRVYVYGEEDQIFSRDFQLWQINNYKPDKVYCVPSADHKIMISRVNELAQILQEVANSAPDLLAVS

SEQ ID NO: 209 - DNA, 783 bp, synthetic construct
  misc_feature 1..783: note = Description of Artificial Sequence: Synthetic polynucleotide
  source 1..783: mol_type = other DNA
atgagtgcgcattttattctgatccacagtatttgccatggcgcctggctgtggtataaactgatcccgttattacagtctgcaggtcataacgttacggcgattgatctttttgctagcgggagtaatcctcaccaactggaacagattggcacatggcgccagtactcagaaccattgttcaccctgatcgaatcgattccggaaggtaagaaagtcattctggtaggagaagcgggtggcggcatcaatattgcactggccgcggagaaatatccggagaaagtgagcgctctcgtctttgtgaacggtcttatgcccgatatcgatcacagtccagcgttcgtggtaaagaaatatagcgaagttttcactgactggaaagattcgatcttcagcaattatacctacggtaacgacacggtcaccgcggttgaattgggagatcgtactctggagaacatcttctccaattctccgattgaagatgtagaactggcgaaacatcgtgtccgcaaaggctccttttttctgcaagacttggataccctgccgaactttacgtcggaagggtatggttcaattcgtcgtgtgtatgtttacggcgaagaagaccagatctttagccgcgattttcagttatggcaaattaataattataagcctgataaagtgtactgtgtaccgagtgctgaccacaagattatgatcagccgcgtcaacgagctggcccagattctccaagaagttgcaaactctgcgagcgggcttcttgcggtgagt

SEQ ID NO: 210 - protein, 261 aa, synthetic construct
  REGION 1..261: note = Description of Artificial Sequence: Synthetic polypeptide
MSAHFILIHSICHGAWLWYKLIPLLQSAGHNVTAIDLFASGSNPHQLEQIGTWRQYSEPLFTLIESIPEGKKVILVGEAGGGINIALAAEKYPEKVSALVFVNGLMPDIDHSPAFVVKKYSEVFTDWKDSIFSNYTYGNDTVTAVELGDRTLENIFSNSPIEDVELAKHRVRKGSFFLQDLDTLPNFTSEGYGSIRRVYVYGEEDQIFSRDFQLWQINNYKPDKVYCVPSADHKIMISRVNELAQILQEVANSASGLLAVS

SEQ ID NO: 211 - DNA, 783 bp, synthetic construct
  misc_feature 1..783: note = Description of Artificial Sequence: Synthetic polynucleotide
  source 1..783: mol_type = other DNA
atgagtgcgcattttattctgatccacagtatttgccatggcgcctggctgtggtataaactgatcccgttattacagtctgcaggtcataacgttacggcgattgatctttttgctagcgggagtaatcctcaccaactggaacagattggcacatggcgccagtactcagaaccattgttcaccctgatcgaatcgattccggaaggtaagaaagtcattctggtaggagaagcgggtggcggcatcaatattgcactggccgcggagaaatatccggagaaagtgagcgctctcgtctttgtgaacggtcttatgcccgatatcgatcacagtccagcgttcgtggtaaagaaatatagcgaagttttcactgactggaaagattcgatcttcagcaattatacctacggtaacgacacggtcaccgcggttgaattgggagatcgtactctggagaacatcttctccaattctccgattgaagatgtagaactggcgaaacatcgtgtccgcaaaggctccttttttctgcaagacttggataccctgccgaactttacgtcggaagggtatggttcaattcgtcgtgtgtatgtttacggcgaagaagaccagatctttagccgcgattttcagttatggcaaattaataattataagcctgataaagtgtactgtgtaccgagtgctgaccacaagattatgatcagccgcgtcaacgagctggcccagattctccaagaagttgcaaactctgcgagcgataatcttgcggtgagt

SEQ ID NO: 212 - protein, 261 aa, synthetic construct
  REGION 1..261: note = Description of Artificial Sequence: Synthetic polypeptide
MSAHFILIHSICHGAWLWYKLIPLLQSAGHNVTAIDLFASGSNPHQLEQIGTWRQYSEPLFTLIESIPEGKKVILVGEAGGGINIALAAEKYPEKVSALVFVNGLMPDIDHSPAFVVKKYSEVFTDWKDSIFSNYTYGNDTVTAVELGDRTLENIFSNSPIEDVELAKHRVRKGSFFLQDLDTLPNFTSEGYGSIRRVYVYGEEDQIFSRDFQLWQINNYKPDKVYCVPSADHKIMISRVNELAQILQEVANSASDNLAVS

SEQ ID NO: 213 - DNA, 783 bp, synthetic construct
  misc_feature 1..783: note = Description of Artificial Sequence: Synthetic polynucleotide
  source 1..783: mol_type = other DNA
atgagtgcgcattttattctgatccacagtatttgccatggcgcctggctgtggtataaactgatcccgttattacagtctgcaggtcataacgttacggcgattgatctttttgctagcgggagtaatcctcaccaactggaacagattggcacatggcgccagtactcagaaccattgttcaccctgatcgaatcgattccggaaggtaagaaagtcattctggtaggagaagcgggtggcggcatcaatattgcactggccgcggagaaatatccggagaaagtgagcgctctcgtctttgtgaacggtcttatgcccgatatcgatcacagtccagcgttcgtggtaaagaaatatagcgaagttttcactgactggaaagattcgatcttcagcaattatacctacggtaacgacacggtcaccgcggttgaattgggagatcgtactctggagaacatcttctccaattctccgattgaagatgtagaactggcgaaacatcgtgtccgcaaaggctccttttttctgcaagacttggataccctgccgaactttacgtcggaagggtatggttcaattaagcgtgtgtatgtttacggcgaagaagaccagatctttagccgcgattttcagttatggcaaattaataattataagcctgataaagtgtactgtgtaccgagtgctgaccacaagattatgatcagccgcgtcaacgagctggcccagattctccaagaagttgcaaactctgcgagcgatcttcttgcggtgagt

SEQ ID NO: 214 - protein, 261 aa, synthetic construct
  REGION 1..261: note = Description of Artificial Sequence: Synthetic polypeptide
MSAHFILIHSICHGAWLWYKLIPLLQSAGHNVTAIDLFASGSNPHQLEQIGTWRQYSEPLFTLIESIPEGKKVILVGEAGGGINIALAAEKYPEKVSALVFVNGLMPDIDHSPAFVVKKYSEVFTDWKDSIFSNYTYGNDTVTAVELGDRTLENIFSNSPIEDVELAKHRVRKGSFFLQDLDTLPNFTSEGYGSIKRVYVYGEEDQIFSRDFQLWQINNYKPDKVYCVPSADHKIMISRVNELAQILQEVANSASDLLAVS

SEQ ID NO: 215 - DNA, 780 bp, synthetic construct
  misc_feature 1..780: note = Description of Artificial Sequence: Synthetic polynucleotide
  source 1..780: mol_type = other DNA
atgagtgcgcattttattctgatccacagtatctgccatggcgcctggctgtggtataaactgatcccgttattacagtctgcaggtcataccgttacggcgattgatcttgtcgctagcgggagtaatcctcaccaactggaagatattggcacatggggtcagtactcagaaccattgttcaccctgatcgaatcgattccggaaggtaagaaagtcattctggtaggagaagcggggggcggcatcaatattgcactggccgcggagaaatatccggagaaagtgagcgctctcgtctttgtgaacggtcttatgcccgatatcgatcacagtccagcgttcgtggtaaagaaatatagcgaagttttcactgactggaaagattcgggcttcagcaattatacctacggtaacgacacggtcaccgcggttaaattgggagatcgtctgctggagaatatcttctccatgtctccgattgaagatgtagaactggcgaaacatcgtgtccgcaaaggctccttttttctgcaagacttggatacgctgccgaactttacgtcggaagggtatggttcaattcgtcgtgtgtatgtttacggcgaagaagaccgcgtttttagccgcgattttcagttatggcaaattaataattataagcctgataaagtgtactgtgtaccgggtgctgaccacaagattatgatcagccgcgtcaacgagctggcccagattctcggggaagttgcaaactctgcgagcgatcttcttgcggtg

SEQ ID NO: 216 - protein, 260 aa, synthetic construct
  REGION 1..260: note = Description of Artificial Sequence: Synthetic polypeptide
MSAHFILIHSICHGAWLWYKLIPLLQSAGHTVTAIDLVASGSNPHQLEDIGTWGQYSEPLFTLIESIPEGKKVILVGEAGGGINIALAAEKYPEKVSALVFVNGLMPDIDHSPAFVVKKYSEVFTDWKDSGFSNYTYGNDTVTAVKLGDRLLENIFSMSPIEDVELAKHRVRKGSFFLQDLDTLPNFTSEGYGSIRRVYVYGEEDRVFSRDFQLWQINNYKPDKVYCVPGADHKIMISRVNELAQILGEVANSASDLLAV

SEQ ID NO: 217 - DNA, 771 bp, synthetic construct
  misc_feature 1..771: note = Description of Artificial Sequence: Synthetic polynucleotide
  source 1..771: mol_type = other DNA
atgagtgcgcattttattctgatccacagtatctgccatggcgcctggctgtggtataaactgatcccgttattacagtctgcaggtcataccgttacggcgattgatcttgtcgctagcgggagtaatcctcaccaactggaagatattggcacatggggtcagtactcagaaccattgttcaccctgatcgaatcgattccggaaggtaagaaagtcattctggtaggagaagcggggggcggcatcaatattgcactggccgcggagaaatatccggagaaagtgagcgctctcgtctttgtgaacggtcttatgcccgatatcgaccacagtccagcgttcgtggtaaagaaatatagcgaagttttcactgactggaaagattcgattttcagcaattatacctacggtaacgacacggtcaccgcggttaaattgggagatcgtctgctggagaatatcttctccatgtctccgattgaagatgtagaactggcgaaacatcgtgtccgcaaaggctccttttttctgcaagacttggatacgctgccgaactttacgtcggaagggtatggtggtattcgtcgtgtgtatgtttacggcgaagaagaccaggtttttagccgcgattttcagttatggcaaattaataattataagcctgataaagtgtactgtgtaccgggtgctgaccacaagattatgatcagccgcgtcaacgagctggcccagattctccaggaagttgcaaactctgcgtcggatctt

SEQ ID NO: 218 - protein, 257 aa, synthetic construct
  REGION 1..257: note = Description of Artificial Sequence: Synthetic polypeptide
MSAHFILIHSICHGAWLWYKLIPLLQSAGHTVTAIDLVASGSNPHQLEDIGTWGQYSEPLFTLIESIPEGKKVILVGEAGGGINIALAAEKYPEKVSALVFVNGLMPDIDHSPAFVVKKYSEVFTDWKDSIFSNYTYGNDTVTAVKLGDRLLENIFSMSPIEDVELAKHRVRKGSFFLQDLDTLPNFTSEGYGGIRRVYVYGEEDQVFSRDFQLWQINNYKPDKVYCVPGADHKIMISRVNELAQILQEVANSASDL

SEQ ID NO: 219 - DNA, 771 bp, synthetic construct
  misc_feature 1..771: note = Description of Artificial Sequence: Synthetic polynucleotide
  source 1..771: mol_type = other DNA
atgagtgcgcattttattctgatccacagtatctgccatggcgcctggctgtggtataaactgatcccgttattacagtctgcaggtcataccgttacggcgattgatcttgtcgctagcgggagtaatcctcaccaactggaagaaattggcacatggggtcagtactcagaaccattgttcaccctgatcgaatcgattccggaaggtaagaaagtcattctggtaggagaagcggggggcggcatcaatattgcactggccgcggagaaatatccggagaaagtgagcgctctcgtctttgtgaacggtcttatgcccgatatcgaccacagtccagcgttcgtggtaaagaaatatagcgaagttttcactgactggaaagattcgatcttcagcaattatacctacggtaacgacacggtcaccgcggttaaattgggagatcgtctgctggagaatatcttctccaattctccgattgaagatgtagaactggcgaaacatcgtgtccgcaaaggctccttttttctgcaagacttggatcgcctgccgaactttacgtcgcgcgggtatggtagtattcgtcgtgtgtatgtttacggcgaagaagaccaggtttttagccgcgattttcagttatggcaaattaataattataagcctgataaagtgtactgtgtaccgggtgctgaccacaagattatgatcagccgcgtcaacgagctggcccagattctcggggaagttgcaaactctgcgtcggatctt

SEQ ID NO: 220 - protein, 257 aa, synthetic construct
  REGION 1..257: note = Description of Artificial Sequence: Synthetic polypeptide
MSAHFILIHSICHGAWLWYKLIPLLQSAGHTVTAIDLVASGSNPHQLEEIGTWGQYSEPLFTLIESIPEGKKVILVGEAGGGINIALAAEKYPEKVSALVFVNGLMPDIDHSPAFVVKKYSEVFTDWKDSIFSNYTYGNDTVTAVKLGDRLLENIFSNSPIEDVELAKHRVRKGSFFLQDLDRLPNFTSRGYGSIRRVYVYGEEDQVFSRDFQLWQINNYKPDKVYCVPGADHKIMISRVNELAQILGEVANSASDL

SEQ ID NO: 221 - DNA, 780 bp, synthetic construct
  misc_feature 1..780: note = Description of Artificial Sequence: Synthetic polynucleotide
  source 1..780: mol_type = other DNA
atgagtgcgcattttattctgatccacagtatctgccatggcgcctggctgtggtataaactgatcccgttattacagtctgcaggtcataccgttacggcgattgatcttgtcgctagcgggagtaatcctcaccaactggaagaaattggcacatggcgccagtactcagaaccattgttcaccctgatcgaatcgattccggaaggtaagaaagtcattctggtaggagaagcggggggcggcatcaatattgcactggccgcggagaaatatccggagaaagtgagcgctctcgtctttgtgaacggtcttatgcccgatatcgatcacagtccagcgttcgtggtaaagaaatatagcgaagttttcactgactggaaagattcgatcttcagcaattatacctacggtaacgacacggtcaccgcggttgaattgggagatcgtctgctggagaatatcttctccatgtctccgattgaagatgtagaactggcgaaacatcgtgtccgcaaaggctccttttttctgcaagacttggatcgcctgccgaactttacgtcggaagggtatggttcaattcgtcgtgtgtatgtttacggcgaagaagaccgcatctttagccgcgattttcagttatggcaaattaataattataagcctgataaagtgtactgtgtaccgggtgctgaccacaagattatgatcagccgcgtcaacgagctggcccagattctccaggaagttgcaaactctgcgagcgatcttcttgcggtg

SEQ ID NO: 222 - protein, 260 aa, synthetic construct
  REGION 1..260: note = Description of Artificial Sequence: Synthetic polypeptide
MSAHFILIHSICHGAWLWYKLIPLLQSAGHTVTAIDLVASGSNPHQLEEIGTWRQYSEPLFTLIESIPEGKKVILVGEAGGGINIALAAEKYPEKVSALVFVNGLMPDIDHSPAFVVKKYSEVFTDWKDSIFSNYTYGNDTVTAVELGDRLLENIFSMSPIEDVELAKHRVRKGSFFLQDLDRLPNFTSEGYGSIRRVYVYGEEDRIFSRDFQLWQINNYKPDKVYCVPGADHKIMISRVNELAQILQEVANSASDLLAV

SEQ ID NO: 223 - DNA, 780 bp, synthetic construct
  misc_feature 1..780: note = Description of Artificial Sequence: Synthetic polynucleotide
  source 1..780: mol_type = other DNA
atgagtgcgcattttattctgatccacagtatctgccatggcgcctggctgtggtataaactgatcccgttattacagtctgcaggtcataacgttacggcgattgatcttgtcgctagcgggagtaatcctcaccaactggaagatattggcacatggggtcagtactcagaaccattgttcaccctgatcgaatcgattccggaaggtaagaaagtcattctggtaggagaagcggggggcggcatcaatattgcactggccgcggagaaatatccggagaaagtgagcgctctcgtctttgtgaacggtcttatgcccgatatcgaccacagtccagcgttcgtggtaaagaaatatagcgaagttttcactgactggaaagattcgatcttcagcaattatacctacggtaacgacacggtcaccgcggttaaattgggagatcgtctgctggagaatatcttctccatgtctccgattgaagatgtagaactggcgaaacatcgtgtccgcaaaggctccttttttctgcaagacttggatcgcctgccgaactttacgtcgcgcgggtatggtggtattcgtcgtgtgtatgtttacggcgaagaagacagcgtttttagccgcgattttcagttatggcaaattaataattataagcctgataaagtgtactgtgtaccgggtgctgaccacaagattatgatcagccgcgtcaacgagctggcccagattctcggggaagttgcaaactctgcgagcgatcttcttgcggtg

SEQ ID NO: 224 - protein, 260 aa, synthetic construct
  REGION 1..260: note = Description of Artificial Sequence: Synthetic polypeptide
MSAHFILIHSICHGAWLWYKLIPLLQSAGHNVTAIDLVASGSNPHQLEDIGTWGQYSEPLFTLIESIPEGKKVILVGEAGGGINIALAAEKYPEKVSALVFVNGLMPDIDHSPAFVVKKYSEVFTDWKDSIFSNYTYGNDTVTAVKLGDRLLENIFSMSPIEDVELAKHRVRKGSFFLQDLDRLPNFTSRGYGGIRRVYVYGEEDSVFSRDFQLWQINNYKPDKVYCVPGADHKIMISRVNELAQILGEVANSASDLLAV

SEQ ID NO: 225 - DNA, 780 bp, synthetic construct
  misc_feature 1..780: note = Description of Artificial Sequence: Synthetic polynucleotide
  source 1..780: mol_type = other DNA
atgagtgcgcattttattctgatccacagtatctgccatggcgcctggctgtggtataaactgatcccgttattacagtctgcaggtcataccgttacggcgattgatcttgtcgctagcgggagtaatcctcaccaactggaagaaattggcacatggcgccagtactcagaaccattgttcaccctgatcgaatcgattccggaaggtaagaaagtcattctggtaggagaagcggggggcggcatcaatattgcactggccgcggagaaatatccggagaaagtgagcgctctcgtctttgtgaacggtcttatgcccgatatcgatcacagtccagcgttcgtggtaaagaaatatagcgaagttttcactgactggaaagattcgatcttcagcaattatacctacggtaacgacacggtcaccgcggttgaattgggagatcgtaccctggagaatatcttctccatgtctccgattgaagatgtagaactggcgaaacatcgtgtccgcaaaggctccttttttctgcaagacttggataccctgccgaactttacgtcggaagggtatggtagtattcgtcgtgtgtatgtttacggcgaagaagaccgcgtttttagccgcgattttcagttatggcaaattaataattataagcctgataaagtgtactgtgtaccgggtgctgaccacaagattatgatcagccgcgtcaacgagctggcccagattctcggggaagttgcaaactctgcgagcgatcttcttgcggtg

SEQ ID NO: 226 - protein, 260 aa, synthetic construct
  REGION 1..260: note = Description of Artificial Sequence: Synthetic polypeptide
MSAHFILIHSICHGAWLWYKLIPLLQSAGHTVTAIDLVASGSNPHQLEEIGTWRQYSEPLFTLIESIPEGKKVILVGEAGGGINIALAAEKYPEKVSALVFVNGLMPDIDHSPAFVVKKYSEVFTDWKDSIFSNYTYGNDTVTAVELGDRTLENIFSMSPIEDVELAKHRVRKGSFFLQDLDTLPNFTSEGYGSIRRVYVYGEEDRVFSRDFQLWQINNYKPDKVYCVPGADHKIMISRVNELAQILGEVANSASDLLAV

SEQ ID NO: 227 - DNA, 780 bp, synthetic construct
  misc_feature 1..780: note = Description of Artificial Sequence: Synthetic polynucleotide
  source 1..780: mol_type = other DNA
atgagtgcgcattttattctgatccacagtatctgccatggcgcctggctgtggtataaactgatcccgttattacagtctgcaggtcataccgttacggcgattgatcttgtcgctagcgggagtaatcctcaccaactggaagaaattggcacatggcgccagtactcagaaccattgttcaccctgatcgaatcgattccggaaggtaagaaagtcattctggtaggagaagcggggggcggcatcaatattgcactggccgcggagaaatatccggagaaagtgagcgctctcgtctttgtgaacggtcttatgcccgatatcgatcacagtccagcgttcgtggtaaagaaatatagcgaagttttcactgactggaaagattcgatcttcagcaattatacctacggtaacgacacggtcaccgcggttgaattgggagatcgtctgctggagaatatcttctccatgtctccgattgaagatgtagaactggcgaaacatcgtgtccgcaaaggctccttttttctgcaagacttggataccctgccgaactttacgtcggaagggtatggtagtattcgtcgtgtgtatgtttacggcgaagaagaccgcatctttagccgcgattttcagttatggcaaattaataattataagcctgataaagtgtactgtgtaccgggtgctgaccacaagattatgatcagccgcgtcaacgagctggcccagattctccaagaagttgcaaactctgcgagcgatcttcttgcggtg

SEQ ID NO: 228 - protein, 260 aa, synthetic construct
  REGION 1..260: note = Description of Artificial Sequence: Synthetic polypeptide
MSAHFILIHSICHGAWLWYKLIPLLQSAGHTVTAIDLVASGSNPHQLEEIGTWRQYSEPLFTLIESIPEGKKVILVGEAGGGINIALAAEKYPEKVSALVFVNGLMPDIDHSPAFVVKKYSEVFTDWKDSIFSNYTYGNDTVTAVELGDRLLENIFSMSPIEDVELAKHRVRKGSFFLQDLDTLPNFTSEGYGSIRRVYVYGEEDRIFSRDFQLWQINNYKPDKVYCVPGADHKIMISRVNELAQILQEVANSASDLLAV

SEQ ID NO: 229 - DNA, 780 bp, synthetic construct
  misc_feature 1..780: note = Description of Artificial Sequence: Synthetic polynucleotide
  source 1..780: mol_type = other DNA
atgagtgcgcattttattctgatccacagtatctgccatggcgcctggctgtggtataaactgatcccgttattacagtctgcaggtcataacgttacggcgattgatcttgtcgctagcgggagtaatcctcaccaactggaagaaattggcacatggcgccagtactcagaaccattgttcaccctgatcgaatcgattccggaaggtaagaaagtcattctggtaggagaagcggggggcggcatcaatattgcactggccgcggagaaatatccggagaaagtgagcgctctcgtctttgtgaacggtcttatgcccgatatcgatcacagtccagcgttcgtggtaaagaaatatagcgaagttttcactgactggaaagattcgatcttcagcaattatacctacggtaacgacacggtcaccgcggttaaattgggagatcgtaccctggagaatatcttctccaattctccgattgaagatgtagaactggcgaaacatcgtgtccgcaaaggctccttttttctgcaagacttggatacgctgccgaactttacgtcggaagggtatggttcaattcgtcgtgtgtatgtttacggcgaagaagaccaggtttttagccgcgattttcagttatggcaaattaataattataagcctgataaagtgtactgtgtaccgggtgctgaccacaagattatgatcagccgcgtcaacgagctggcccagattctccaggaagttgcaaactctgcgagcgatcttcttgcggtg

SEQ ID NO: 230 - protein, 260 aa, synthetic construct
  REGION 1..260: note = Description of Artificial Sequence: Synthetic polypeptide
MSAHFILIHSICHGAWLWYKLIPLLQSAGHNVTAIDLVASGSNPHQLEEIGTWRQYSEPLFTLIESIPEGKKVILVGEAGGGINIALAAEKYPEKVSALVFVNGLMPDIDHSPAFVVKKYSEVFTDWKDSIFSNYTYGNDTVTAVKLGDRTLENIFSNSPIEDVELAKHRVRKGSFFLQDLDTLPNFTSEGYGSIRRVYVYGEEDQVFSRDFQLWQINNYKPDKVYCVPGADHKIMISRVNELAQILQEVANSASDLLAV

SEQ ID NO: 231 - DNA, 780 bp, synthetic construct
  misc_feature 1..780: note = Description of Artificial Sequence: Synthetic polynucleotide
  source 1..780: mol_type = other DNA
atgagtgcgcattttattctgatccacagtatctgccatggcgcctggctgtggtataaactgatcccgttattacagtctgcaggtcataacgttacggcgattgatcttgtcgctagcgggagtaatcctcaccaactggaagaaattggcacatggggtcagtactcagaaccattgttcaccctgatcgaatcgattccggaaggtaagaaagtcattctggtaggagaagcggggggcggcatcaatattgcactggccgcggagaaatatccggagaaagtgagcgctctcgtctttgtgaacggtcttatgcccgatatcgaccacagtccagcgttcgtggtaaagaaatatagcgaagttttcactgactggaaagattcgattttcagcaattatacctacggtaacgacacggtcaccgcggttgaattgggagatcgtaccctggagaatatcttctccatgtctccgattgaagatgtagaactggcgaaacatcgtgtccgcaaaggctccttttttctgcaagacttggatacgctgccgaactttacgtcggaagggtatggttcaattcgtcgtgtgtatgtttacggcgaagaagaccaggtttttagccgcgattttcagttatggcaaattaataattataagcctgataaagtgtactgtgtaccgggtgctgaccacaagattatgatcagccgcgtcaacgagctggcccagattctccaggaagttgcaaactctgcgagcgaacttcttgcggtg

SEQ ID NO: 232 - protein, 260 aa, synthetic construct
  REGION 1..260: note = Description of Artificial Sequence: Synthetic polypeptide
MSAHFILIHSICHGAWLWYKLIPLLQSAGHNVTAIDLVASGSNPHQLEEIGTWGQYSEPLFTLIESIPEGKKVILVGEAGGGINIALAAEKYPEKVSALVFVNGLMPDIDHSPAFVVKKYSEVFTDWKDSIFSNYTYGNDTVTAVELGDRTLENIFSMSPIEDVELAKHRVRKGSFFLQDLDTLPNFTSEGYGSIRRVYVYGEEDQVFSRDFQLWQINNYKPDKVYCVPGADHKIMISRVNELAQILQEVANSASELLAV

SEQ ID NO: 233 - DNA, 780 bp, synthetic construct
  misc_feature 1..780: note = Description of Artificial Sequence: Synthetic polynucleotide
  source 1..780: mol_type = other DNA
atgagtgcgcattttattctgatccacagtatctgccatggcgcctggctgtggtataaactgatcccgttattacagtctgcaggtcataccgttacggcgattgatcttgtcgctagcgggagtaatcctcaccaactggaagaaattggcacatggcgccagtactcagaaccattgttcaccctgatcgaatcgattccggaaggtaagaaagtcattctggtaggagaagcggggggcggcatcaatattgcactggccgcggagaaatatccggagaaagtgagcgctctcgtctttgtgaacggtcttatgcccgatatctcgcacagtccagcgttcgtggtaaagaaatatagcgaagttttcactgactggaaagattcgattttcagcaattatacctacggtaacgacacggtcaccgcggttgaattgggagatcgtaccctggagaatatcttctccatgtctccgattgaagatgtagaactggcgaaacatcgtgtccgcaaaggctccttttttctgcaagacttggatacgctgccgaactttacgtcggaagggtatggttcaattcgtcgtgtgtatgtttacggcgaagaagacagcatttttagccgcgattttcagttatggcaaattaataattataagcctgataaagtgtactgtgtaccgggtgctgaccacaagattatgatcagccgcgtcaacgagctggcccagattctccaggaagttgcaaactctgcgagcgatcttcttgcggtg

SEQ ID NO: 234 - protein, 260 aa, synthetic construct
  REGION 1..260: note = Description of Artificial Sequence: Synthetic polypeptide
MSAHFILIHSICHGAWLWYKLIPLLQSAGHTVTAIDLVASGSNPHQLEEIGTWRQYSEPLFTLIESIPEGKKVILVGEAGGGINIALAAEKYPEKVSALVFVNGLMPDISHSPAFVVKKYSEVFTDWKDSIFSNYTYGNDTVTAVELGDRTLENIFSMSPIEDVELAKHRVRKGSFFLQDLDTLPNFTSEGYGSIRRVYVYGEEDSIFSRDFQLWQINNYKPDKVYCVPGADHKIMISRVNELAQILQEVANSASDLLAV

SEQ ID NO: 235 - DNA, 780 bp, synthetic construct
  misc_feature 1..780: note = Description of Artificial Sequence: Synthetic polynucleotide
  source 1..780: mol_type = other DNA
atgagtgcgcattttattctgatccacagtatctgccatggcgcctggctgtggtataaactgatcccgttattacagtctgcaggtcataacgttacggcgattgatcttgtcgctagcgggagtaatcctcaccaactggaagaaattggcacatggcgtcagtactcagaaccattgttcaccctgatcgaatcgattccggaaggtaagaaagtcattctggtaggagaagcggggggcggcatcaatattgcactggccgcggagaaatatccggagaaagtgagcgctctcgtctttgtgaacggtcttatgcccgatatcgaccacagtccagcgttcgtggtaaagaaatatagcgaagttttcactgactggaaagattcgatcttcagcaattatacctacggtaacgacacggtcaccgcggttaaattgggagatcgtaccctggagaatatcttctccatgtctccgattgaagatgtagaactggcgaaacatcgtgtccgcaaaggctccttttttctgcaagacttggatacgctgccgaactttacgtcggaagggtatggttcaattcgtcgtgtgtatgtttacggcgaagaagacagcgtttttagccgcgattttcagttatggcaaattaataattataagcctgataaagtgtactgtgtaccgggtgctgaccacaagattatgatcagccgcgtcaacgagctggcccagattctcggggaagttgcaaactctgcgagcgatcttcttgcggtg

SEQ ID NO: 236 - protein, 260 aa, synthetic construct
  REGION 1..260: note = Description of Artificial Sequence: Synthetic polypeptide
MSAHFILIHSICHGAWLWYKLIPLLQSAGHNVTAIDLVASGSNPHQLEEIGTWRQYSEPLFTLIESIPEGKKVILVGEAGGGINIALAAEKYPEKVSALVFVNGLMPDIDHSPAFVVKKYSEVFTDWKDSIFSNYTYGNDTVTAVKLGDRTLENIFSMSPIEDVELAKHRVRKGSFFLQDLDTLPNFTSEGYGSIRRVYVYGEEDSVFSRDFQLWQINNYKPDKVYCVPGADHKIMISRVNELAQILGEVANSASDLLAV

SEQ ID NO: 237 - DNA, 780 bp, synthetic construct
  misc_feature 1..780: note = Description of Artificial Sequence: Synthetic polynucleotide
  source 1..780: mol_type = other DNA
atgagtgcgcattttattctgatccacagtatctgccatggcgcctggctgtggtataaactgatcccgttattacagtctgcaggtcataccgttacggcgattgatcttgtcgctagcgggagtaatcctcaccaactggaagatattggcacatggggtcagtactcagaaccattgttcaccctgatcgaatcgattccggaaggtaagaaagtcattctggtaggagaagcggggggcggcatcaatattgcactggccgcggagaaatatccggagaaagtgagcgctctcgtctttgtgaacggtcttatgcccgatatcgaccacagtccagcgttcgtggtaaagaaatatagcgaagttttcactgactggaaagattcgggcttcagcaattatacctacggtaacgacacggtcaccgcggttaaattgggagatcgtaccctggagaatatcttctccatgtctccgattgaagatgtagaactggcgaaacatcgtgtccgcaaaggctccttttttctgcaagacttggatcgcctgccgaactttacgtcggaagggtatggttcaattcgtcgtgtgtatgtttacggcgaagaagaccgcatctttagccgcgattttcagttatggcaaattaataattataagcctgataaagtgtactgtgtaccgggtgctgaccacaagattatgatcagccgcgtcaacgagctggcccagattctccaagaagttgcaaactctgcgagcgatcttcttgcggtg

SEQ ID NO: 238 - protein, 260 aa, synthetic construct
  REGION 1..260: note = Description of Artificial Sequence: Synthetic polypeptide
MSAHFILIHSICHGAWLWYKLIPLLQSAGHTVTAIDLVASGSNPHQLEDIGTWGQYSEPLFTLIESIPEGKKVILVGEAGGGINIALAAEKYPEKVSALVFVNGLMPDIDHSPAFVVKKYSEVFTDWKDSGFSNYTYGNDTVTAVKLGDRTLENIFSMSPIEDVELAKHRVRKGSFFLQDLDRLPNFTSEGYGSIRRVYVYGEEDRIFSRDFQLWQINNYKPDKVYCVPGADHKIMISRVNELAQILQEVANSASDLLAV

SEQ ID NO: 239 - DNA, 765 bp, synthetic construct
  misc_feature 1..765: note = Description of Artificial Sequence: Synthetic polynucleotide
  source 1..765: mol_type = other DNA
atgagtgcgcattttattctgatccacagtatctgccatggcgcctggctgtggtataaactgatcccgttattacagtctgcaggtcataccgttacggcgattgatcttgtcgctagcgggagtaatcctcaccaactggaagatattggcacatggggtcagtactcagaaccattgttcaccctgatcgaatcgattccggaaggtaagaaagtcattctggtaggagaagcggggggcggcatcaatattgcactggccgcggagaaatatccggagaaagtgagcgctctcgtctttgtgaacggtcttatgcccgatatctcgcacagtccagcgttcgtggtaaagaaatatagcgaagttttcactgactggaaagattcgatcttcagcaattatacctacggtaacgacacggtcaccgcggttaaattgggagatcgtctgctggagaatatcttctccatgtctccgattgaagatgtagaactggcgaaacatcgtgtccgcaaaggctccttttttctgcaagacttggatcgcctgccgaactttacgtcggaagggtatggtggtattcgtcgtgtgtatgtttacggcgaagaagaccaggtttttagccgcgattttcagttatggcaaattaataattataagcctgataaagtgtactgtgtaccgggtgctgaccacaagattatgatcagccgcgtcaacgagctggcccagattctcggggaagttgcaaactctgcgtcg

SEQ ID NO: 240 - protein, 255 aa, synthetic construct
  REGION 1..255: note = Description of Artificial Sequence: Synthetic polypeptide
MSAHFILIHSICHGAWLWYKLIPLLQSAGHTVTAIDLVASGSNPHQLEDIGTWGQYSEPLFTLIESIPEGKKVILVGEAGGGINIALAAEKYPEKVSALVFVNGLMPDISHSPAFVVKKYSEVFTDWKDSIFSNYTYGNDTVTAVKLGDRLLENIFSMSPIEDVELAKHRVRKGSFFLQDLDRLPNFTSEGYGGIRRVYVYGEEDQVFSRDFQLWQINNYKPDKVYCVPGADHKIMISRVNELAQILGEVANSAS

SEQ ID NO: 241 - DNA, 780 bp, synthetic construct
  misc_feature 1..780: note = Description of Artificial Sequence: Synthetic polynucleotide
  source 1..780: mol_type = other DNA
atgagtgcgcattttattctgatccacagtatctgccatggcgcctggctgtggtataaactgatcccgttattacagtctgcaggtcataccgttacggcgattgatcttgtcgctagcgggagtaatcctcaccaactggaagaaattggcacatggcgccagtactcagaaccattgttcaccctgatcgaatcgattccggaaggtaagaaagtcattctggtaggagaagcggggggcggcatcaatattgcactggccgcggagaaatatccggagaaagtgagcgctctcgtctttgtgaacggtcttatgcccgatatcgatcacagtccagcgttcgtggtaaagaaatatagcgaagttttcactgactggaaagattcgatcttcagcaattatacctacggtaacgacacggtcaccgcggttgaattgggagatcgtctgctggagaatatcttctccatgtctccgattgaagatgtagaactggcgaaacatcgtgtccgcaaaggctccttttttctgcaagacttggataccctgccgaactttacgtcggaagggtatggtggtattcgtcgtgtgtatgtttacggcgaagaagaccagatttttagccgcgattttcagttatggcaaattaataattataagcctgataaagtgtactgtgtaccgggtgctgaccacaagattatgatcagccgcgtcaacgagctggcccagattctccaggaagttgcaaactctgcgagcgatcttcttgcggtg

SEQ ID NO: 242 - protein, 260 aa, synthetic construct
  REGION 1..260: note = Description of Artificial Sequence: Synthetic polypeptide
MSAHFILIHSICHGAWLWYKLIPLLQSAGHTVTAIDLVASGSNPHQLEEIGTWRQYSEPLFTLIESIPEGKKVILVGEAGGGINIALAAEKYPEKVSALVFVNGLMPDIDHSPAFVVKKYSEVFTDWKDSIFSNYTYGNDTVTAVELGDRLLENIFSMSPIEDVELAKHRVRKGSFFLQDLDTLPNFTSEGYGGIRRVYVYGEEDQIFSRDFQLWQINNYKPDKVYCVPGADHKIMISRVNELAQILQEVANSASDLLAV

SEQ ID NO: 243 - DNA, 780 bp, synthetic construct
  misc_feature 1..780: note = Description of Artificial Sequence: Synthetic polynucleotide
  source 1..780: mol_type = other DNA
atgagtgcgcattttattctgatccacagtatctgccatggcgcctggctgtggtataaactgatcccgttattacagtctgcaggtcataacgttacggcgattgatcttgtcgctagcgggagtaatcctcaccaactggaagatattggcacatggggtcagtactcagaaccattgttcaccctgatcgaatcgattccggaaggtaagaaagtcattctggtaggagaagcggggggcggcatcaatattgcactggccgcggagaaatatccggagaaagtgagcgctctcgtctttgtgaacggtcttatgcccgatatcgaccacagtccagcgttcgtggtaaagaaatatagcgaagttttcactgactggaaagattcgattttcagcaattatacctacggtaacgacacggtcaccgcggttgaattgggagatcgtaccctggagaatatcttctccatgtctccgattgaagatgtagaactggcgaaacatcgtgtccgcaaaggctccttttttctgcaagacttggataccctgccgaactttacgtcggaagggtatggtggtattcgtcgtgtgtatgtttacggcgaagaagaccgcgtttttagccgcgattttcagttatggcaaattaataattataagcctgataaagtgtactgtgtaccgggtgctgaccacaagattatgatcagccgcgtcaacgagctggcccagattctccaggaagttgcaaactctgcgagcgatcttcttgcggtg

SEQ ID NO: 244 - protein, 260 aa, synthetic construct
  REGION 1..260: note = Description of Artificial Sequence: Synthetic polypeptide
MSAHFILIHSICHGAWLWYKLIPLLQSAGHNVTAIDLVASGSNPHQLEDIGTWGQYSEPLFTLIESIPEGKKVILVGEAGGGINIALAAEKYPEKVSALVFVNGLMPDIDHSPAFVVKKYSEVFTDWKDSIFSNYTYGNDTVTAVELGDRTLENIFSMSPIEDVELAKHRVRKGSFFLQDLDTLPNFTSEGYGGIRRVYVYGEEDRVFSRDFQLWQINNYKPDKVYCVPGADHKIMISRVNELAQILQEVANSASDLLAV

SEQ ID NO: 245 - DNA, 780 bp, synthetic construct
  misc_feature 1..780: note = Description of Artificial Sequence: Synthetic polynucleotide
  source 1..780: mol_type = other DNA
atgagtgcgcattttattctgatccacagtatctgccatggcgcctggctgtggtataaactgatcccgttattacagtctgcaggtcataccgttacggcgattgatcttgtcgctagcgggagtaatcctcaccaactggaagaaattggcacatggcgtcagtactcagaaccattgttcaccctgatcgaatcgattccggaaggtaagaaagtcattctggtaggagaagcggggggcggcatcaatattgcactggccgcggagaaatatccggagaaagtgagcgctctcgtctttgtgaacggtcttatgcccgatatcgaccacagtccagcgttcgtggtaaagaaatatagcgaagttttcactgactggaaagattcgatcttcagcaattatacctacggtaacgacacggtcaccgcggttgaattgggagatcgtctgctggagaatatcttctccatgtctccgattgaagatgtagaactggcgaaacatcgtgtccgcaaaggctccttttttctgcaagacttggatacgctgccgaactttacgtcggaagggtatggtagtattcgtcgtgtgtatgtttacggcgaagaagaccaggtttttagccgcgattttcagttatggcaaattaataattataagcctgataaagtgtactgtgtaccgggtgctgaccacaagattatgatcagccgcgtcaacgagctggcccagattctccaagaagttgcaaactctgcgagcgatcttcttgcggtg

SEQ ID NO: 246 - protein, 260 aa, synthetic construct
  REGION 1..260: note = Description of Artificial Sequence: Synthetic polypeptide
MSAHFILIHSICHGAWLWYKLIPLLQSAGHTVTAIDLVASGSNPHQLEEIGTWRQYSEPLFTLIESIPEGKKVILVGEAGGGINIALAAEKYPEKVSALVFVNGLMPDIDHSPAFVVKKYSEVFTDWKDSIFSNYTYGNDTVTAVELGDRLLENIFSMSPIEDVELAKHRVRKGSFFLQDLDTLPNFTSEGYGSIRRVYVYGEEDQVFSRDFQLWQINNYKPDKVYCVPGADHKIMISRVNELAQILQEVANSASDLLAV

SEQ ID NO: 247 - DNA, 780 bp, synthetic construct
  misc_feature 1..780: note = Description of Artificial Sequence: Synthetic polynucleotide
  source 1..780: mol_type = other DNA
atgagtgcgcattttattctgatccacagtatctgccatggcgcctggctgtggtataaactgatcccgttattacagtctgcaggtcataacgttacggcgattgatcttgtcgctagcgggagtaatcctcaccaactggaagaaattggcacatggcgccagtactcagaaccattgttcaccctgatcgaatcgattccggaaggtaagaaagtcattctggtaggagaagcggggggcggcatcaatattgcactggccgcggagaaatatccggagaaagtgagcgctctcgtctttgtgaacggtcttatgcccgatatctcgcacagtccagcgttcgtggtaaagaaatatagcgaagttttcactgactggaaagattcgatcttcagcaattatacctacggtaacgacacggtcaccgcggttgaattgggagatcgtaccctggagaatatcttctccatgtctccgattgaagatgtagaactggcgaaacatcgtgtccgcaaaggctccttttttctgcaagacttgtatcgcctgccgaactttacgtcggaagggtatggtagtattcgtcgtgtgtatgtttacggcgaagaagacagcgtttttagccgcgattttcagttatggcaaattaataattataagcctgataaagtgtactgtgtaccgggtgctgaccacaagattatgatcagccgcgtcaacgagctggcccagattctccaagaagttgcaaactctgcgagcgatcttcttgcggtg

SEQ ID NO: 248 - protein, 260 aa, synthetic construct
  REGION 1..260: note = Description of Artificial Sequence: Synthetic polypeptide
MSAHFILIHSICHGAWLWYKLIPLLQSAGHNVTAIDLVASGSNPHQLEEIGTWRQYSEPLFTLIESIPEGKKVILVGEAGGGINIALAAEKYPEKVSALVFVNGLMPDISHSPAFVVKKYSEVFTDWKDSIFSNYTYGNDTVTAVELGDRTLENIFSMSPIEDVELAKHRVRKGSFFLQDLYRLPNFTSEGYGSIRRVYVYGEEDSVFSRDFQLWQINNYKPDKVYCVPGADHKIMISRVNELAQILQEVANSASDLLAV

SEQ ID NO: 249 - DNA, 780 bp, synthetic construct
  misc_feature 1..780: note = Description of Artificial Sequence: Synthetic polynucleotide
  source 1..780: mol_type = other DNA
atgagtgcgcattttattctgatccacagtatctgccatggcgcctggctgtggtataaactgatcccgttattacagtctgcaggtcataccgttacggcgattgatcttgtcgctagcgggagtaatcctcaccaactggaagatattggcacatggcgtcagtactcagaaccattgttcaccctgatcgaatcgattccggaaggtaagaaagtcattctggtaggagaagcggggggcggcatcaatattgcactggccgcggagaaatatccggagaaagtgagcgctctcgtctttgtgaacggtcttatgcccgatatcgaccacagtccagcgttcgtggtaaagaaatatagcgaagttttcactgactggaaagattcgatcttcagcaattatacctacggtaacgacacggtcaccgcggttgaattgggagatcgtctgctggagaatatcttctccatgtctccgattgaagatgtagaactggcgaaacatcgtgtccgcaaaggctccttttttctgcaagacttggatcgcctgccgaactttacgtcggaagggtatggttcaattcgtcgtgtgtatgtttacggcgaagaagaccgcgtttttagccgcgattttcagttatggcaaattaataattataagcctgataaagtgtactgtgtaccgggtgctgaccacaagattatgatcagccgcgtcaacgagctggcccagattctccaagaagttgcaaactctgcgagcgatcttcttgcggtg

SEQ ID NO: 250 - protein, 260 aa, synthetic construct
  REGION 1..260: note = Description of Artificial Sequence: Synthetic polypeptide
MSAHFILIHSICHGAWLWYKLIPLLQSAGHTVTAIDLVASGSNPHQLEDIGTWRQYSEPLFTLIESIPEGKKVILVGEAGGGINIALAAEKYPEKVSALVFVNGLMPDIDHSPAFVVKKYSEVFTDWKDSIFSNYTYGNDTVTAVELGDRLLENIFSMSPIEDVELAKHRVRKGSFFLQDLDRLPNFTSEGYGSIRRVYVYGEEDRVFSRDFQLWQINNYKPDKVYCVPGADHKIMISRVNELAQILQEVANSASDLLAV

SEQ ID NO: 251 - DNA, 780 bp, synthetic construct
  misc_feature 1..780: note = Description of Artificial Sequence: Synthetic polynucleotide
  source 1..780: mol_type = other DNA
atgagtgcgcattttattctgatccacagtatctgccatggcgcctggctgtggtataaactgatcccgttattacagtctgcaggtcataacgttacggcgattgatcttgtcgctagcgggagtaatcctcaccaactggaagaaattggcacatggggtcagtactcagaaccattgttcaccctgatcgaatcgattccggaaggtaagaaagtcattctggtaggagaagcggggggcggcatcaatattgcactggccgcggagaaatatccggagaaagtgagcgctctcgtctttgtgaacggtcttatgcccgatatcgatcacagtccagcgttcgtggtaaagaaatatagcgaagttttcactgactggaaagattcgggcttcagcaattatacctacggtaacgacacggtcaccgcggttgaattgggagatcgtaccctggagaatatcttctccatgtctccgattgaagatgtagaactggcgaaacatcgtgtccgcaaaggctccttttttctgcaagacttggataccctgccgaactttacgtcggaagggtatggtggtattcgtcgtgtgtatgtttacggcgaagaagaccgcatctttagccgcgattttcagttatggcaaattaataattataagcctgataaagtgtactgtgtaccgggtgctgaccacaagattatgatcagccgcgtcaacgagctggcccagattctcggggaagttgcaaactctgcgagcgatcttcttgcggtg

SEQ ID NO: 252 - protein, 260 aa, synthetic construct
  REGION 1..260: note = Description of Artificial Sequence: Synthetic polypeptide
MSAHFILIHSICHGAWLWYKLIPLLQSAGHNVTAIDLVASGSNPHQLEEIGTWGQYSEPLFTLIESIPEGKKVILVGEAGGGINIALAAEKYPEKVSALVFVNGLMPDIDHSPAFVVKKYSEVFTDWKDSGFSNYTYGNDTVTAVELGDRTLENIFSMSPIEDVELAKHRVRKGSFFLQDLDTLPNFTSEGYGGIRRVYVYGEEDRIFSRDFQLWQINNYKPDKVYCVPGADHKIMISRVNELAQILGEVANSASDLLAV

SEQ ID NO: 253 - DNA, 780 bp, synthetic construct
  misc_feature 1..780: note = Description of Artificial Sequence: Synthetic polynucleotide
  source 1..780: mol_type = other DNA
atgagtgcgcattttattctgatccacagtatctgccatggcgcctggctgtggtataaactgatcccgttattacagtctgcaggtcataccgttacggcgattgatcttgtcgctagcgggagtaatcctcaccaactggaagaaattggcacatggggtcagtactcagaaccattgttcaccctgatcgaatcgattccggaaggtaagaaagtcattctggtaggagaagcggggggcggcatcaatattgcactggccgcggagaaatatccggagaaagtgagcgctctcgtctttgtgaacggtcttatgcccgatatcgatcacagtccagcgttcgtggtaaagaaatatagcgaagttttcactgactggaaagattcgatcttcagcaattatacctacggtaacgacacggtcaccgcggttaaattgggagatcgtctgctggagaatatcttctccatgtctccgattgaagatgtagaactggcgaaacatcgtgtccgcaaaggctccttttttctgcaagacttggataccctgccgaactttacgtcgcgcgggtatggtagtattcgtcgtgtgtatgtttacggcgaagaagacagcgtttttagccgcgattttcagttatggcaaattaataattataagcctgataaagtgtactgtgtaccgggtgctgaccacaagattatgatcagccgcgtcaacgagctggcccagattctccaagaagttgcaaactctgcgagcgatcttcttgcggtg

SEQ ID NO: 254 - protein, 260 aa, synthetic construct
  REGION 1..260: note = Description of Artificial Sequence: Synthetic polypeptide
MSAHFILIHSICHGAWLWYKLIPLLQSAGHTVTAIDLVASGSNPHQLEEIGTWGQYSEPLFTLIESIPEGKKVILVGEAGGGINIALAAEKYPEKVSALVFVNGLMPDIDHSPAFVVKKYSEVFTDWKDSIFSNYTYGNDTVTAVKLGDRLLENIFSMSPIEDVELAKHRVRKGSFFLQDLDTLPNFTSRGYGSIRRVYVYGEEDSVFSRDFQLWQINNYKPDKVYCVPGADHKIMISRVNELAQILQEVANSASDLLAV

SEQ ID NO: 255 - DNA, 780 bp, synthetic construct
  misc_feature 1..780: note = Description of Artificial Sequence: Synthetic polynucleotide
  source 1..780: mol_type = other DNA
atgagtgcgcattttattctgatccacagtatctgccatggcgcctggctgtggtataaactgatcccgttattacagtctgcaggtcataacgttacggcgattgatcttgtcgctagcgggagtaatcctcaccaactggaagaaattggcacatggggtcagtactcagaaccattgttcaccctgatcgaatcgattccggaaggtaagaaagtcattctggtaggagaagcggggggcggcatcaatattgcactggccgcggagaaatatccggagaaagtgagcgctctcgtctttgtgaacggtcttatgcccgatatcgaccacagtccagcgttcgtggtaaagaaatatagcgaagttttcactgactggaaagattcgattttcagcaattatacctacggtaacgacacggtcaccgcggttgaattgggagatcgtctgctggagaatatcttctccatgtctccgattgaagatgtagaactggcgaaacatcgtgtccgcaaaggctccttttttctgcaagacttggataccctgccgaactttacgtcggaagggtatggttcaattcgtcgtgtgtatgtttacggcgaagaagaccgcgtttttagccgcgattttcagttatggcaaattaataattataagcctgataaagtgtactgtgtaccgggtgctgaccacaagattatgatcagccgcgtcaacgagctggcccagattctcggggaagttgcaaactctgcgagcgatcttcttgcggtg

SEQ ID NO: 256 - protein, 260 aa, synthetic construct
  REGION 1..260: note = Description of Artificial Sequence: Synthetic polypeptide
MSAHFILIHSICHGAWLWYKLIPLLQSAGHNVTAIDLVASGSNPHQLEEIGTWGQYSEPLFTLIESIPEGKKVILVGEAGGGINIALAAEKYPEKVSALVFVNGLMPDIDHSPAFVVKKYSEVFTDWKDSIFSNYTYGNDTVTAVELGDRLLENIFSMSPIEDVELAKHRVRKGSFFLQDLDTLPNFTSEGYGSIRRVYVYGEEDRVFSRDFQLWQINNYKPDKVYCVPGADHKIMISRVNELAQILGEVANSASDLLAV

SEQ ID NO: 257 - DNA, 780 bp, synthetic construct
  misc_feature 1..780: note = Description of Artificial Sequence: Synthetic polynucleotide
  source 1..780: mol_type = other DNA
atgagtgcgcattttattctgatccacagtatctgccatggcgcctggctgtggtataaactgatcccgttattacagtctgcaggtcataccgttacggcgattgatcttgtcgctagcgggagtaatcctcaccaactggaagaaattggcacatggggtcagtactcagaaccattgttcaccctgatcgaatcgattccggaaggtaagaaagtcattctggtaggagaagcggggggcggcatcaatattgcactggccgcggagaaatatccggagaaagtgagcgctctcgtctttgtgaacggtcttatgcccgatatcgaccacagtccagcgttcgtggtaaagaaatatagcgaagttttcactgactggaaagattcgggcttcagcaattatacctacggtaacgacacggtcaccgcggttaaattgggagatcgtaccctggagaatatcttctccatgtctccgattgaagatgtagaactggcgaaacatcgtgtccgcaaaggctccttttttctgcaagacttggataccctgccgaactttacgtcggaagggtatggttcaattcgtcgtgtgtatgtttacggcgaagaagaccagatttttagccgcgattttcagttatggcaaattaataattataagcctgataaagtgtactgtgtaccgggtgctgaccacaagattatgatcagccgcgtcaacgagctggcccagattctcggggaagttgcaaactctgcgagcgatcttcttgcggtg

SEQ ID NO: 258 - protein, 260 aa, synthetic construct
  REGION 1..260: note = Description of Artificial Sequence: Synthetic polypeptide
MSAHFILIHSICHGAWLWYKLIPLLQSAGHTVTAIDLVASGSNPHQLEEIGTWGQYSEPLFTLIESIPEGKKVILVGEAGGGINIALAAEKYPEKVSALVFVNGLMPDIDHSPAFVVKKYSEVFTDWKDSGFSNYTYGNDTVTAVKLGDRTLENIFSMSPIEDVELAKHRVRKGSFFLQDLDTLPNFTSEGYGSIRRVYVYGEEDQIFSRDFQLWQINNYKPDKVYCVPGADHKIMISRVNELAQILGEVANSASDLLAV

SEQ ID NO: 259 - DNA, 780 bp, synthetic construct
  misc_feature 1..780: note = Description of Artificial Sequence: Synthetic polynucleotide
  source 1..780: mol_type = other DNA
atgagtgcgcattttattctgatccacagtatctgccatggcgcctggctgtggtataaactgatcccgttattacagtctgcaggtcataacgttacggcgattgatcttgtcgctagcgggagtaatcctcaccaactggaagatattggcacatggggtcagtactcagaaccattgttcaccctgatcgaatcgattccggaaggtaagaaagtcattctggtaggagaagcggggggcggcatcaatattgcactggccgcggagaaatatccggagaaagtgagcgctctcgtctttgtgaacggtcttatgcccgatatcgaccacagtccagcgttcgtggtaaagaaatatagcgaagttttcactgactggaaagattcgatcttcagcaattatacctacggtaacgacacggtcaccgcggttgaattgggagatcgtctgctggagaatatcttctccatgtctccgattgaagatgtagaactggcgaaacatcgtgtccgcaaaggctccttttttctgcaagacttggataccctgccgaactttacgtcggaagggtatggttcaattcgtcgtgtgtatgtttacggcgaagaagaccaggtttttagccgcgattttcagttatggcaaattaataattataagcctgataaagtgtactgtgtaccgggtgctgaccacaagattatgatcagccgcgtcaacgagctggcccagattctccaagaagttgcaaactctgcgagcgatcttcttgcggtg

SEQ ID NO: 260 - protein, 260 aa, synthetic construct
  REGION 1..260: note = Description of Artificial Sequence: Synthetic polypeptide
MSAHFILIHSICHGAWLWYKLIPLLQSAGHNVTAIDLVASGSNPHQLEDIGTWGQYSEPLFTLIESIPEGKKVILVGEAGGGINIALAAEKYPEKVSALVFVNGLMPDIDHSPAFVVKKYSEVFTDWKDSIFSNYTYGNDTVTAVELGDRLLENIFSMSPIEDVELAKHRVRKGSFFLQDLDTLPNFTSEGYGSIRRVYVYGEEDQVFSRDFQLWQINNYKPDKVYCVPGADHKIMISRVNELAQILQEVANSASDLLAV

SEQ ID NO: 261 - DNA, 780 bp, synthetic construct
  misc_feature 1..780: note = Description of Artificial Sequence: Synthetic polynucleotide
  source 1..780: mol_type = other DNA
atgagtgcgcattttattctgatccacagtatctgccatggcgcctggctgtggtataaactgatcccgttattacagtctgcaggtcataccgttacggcgattgatcttgtcgctagcgggagtaatcctcaccaactggaagaaattggcacatggggtcagtactcagaaccattgttcaccctgatcgaatcgattccggaaggtaagaaagtcattctggtaggagaagcggggggcggcatcaatattgcactggccgcggagaaatatccggagaaagtgagcgctctcgtctttgtgaacggtcttatgcccgatatctcgcacagtccagcgttcgtggtaaagaaatatagcgaagttttcactgactggaaagattcgatcttcagcaattatacctacggtaacgacacggtcaccgcggttaaattgggagatcgtaccctggagaatatcttctccaattctccgattgaagatgtagaactggcgaaacatcgtgtccgcaaaggctccttttttctgcaagacttggatcgcctgccgaactttacgtcggaagggtatggttcaattcgtcgtgtgtatgtttacggcgaagaagacagcgtttttagccgcgattttcagttatggcaaattaataattataagcctgataaagtgtactgtgtaccgggtgctgaccacaagattatgatcagccgcgtcaacgagctggcccagattctccaggaagttgcaaactctgcgagcgatcttcttgcggtg

SEQ ID NO: 262 - protein, 260 aa, synthetic construct
  REGION 1..260: note = Description of Artificial Sequence: Synthetic polypeptide
MSAHFILIHSICHGAWLWYKLIPLLQSAGHTVTAIDLVASGSNPHQLEEIGTWGQYSEPLFTLIESIPEGKKVILVGEAGGGINIALAAEKYPEKVSALVFVNGLMPDISHSPAFVVKKYSEVFTDWKDSIFSNYTYGNDTVTAVKLGDRTLENIFSNSPIEDVELAKHRVRKGSFFLQDLDRLPNFTSEGYGSIRRVYVYGEEDSVFSRDFQLWQINNYKPDKVYCVPGADHKIMISRVNELAQILQEVANSASDLLAV

SEQ ID NO: 263 - DNA, 780 bp, synthetic construct
  misc_feature 1..780: note = Description of Artificial Sequence: Synthetic polynucleotide
  source 1..780: mol_type = other DNA
atgagtgcgcattttattctgatccacagtatctgccatggcgcctggctgtggtataaactgatcccgttattacagtctgcaggtcataccgttacggcgattgatcttgtcgctagcgggagtaatcctcaccaactggaagaaattggcacatggcgccagtactcagaaccattgttcaccctgatcgaatcgattccggaaggtaagaaagtcattctggtaggagaagcggggggcggcatcaatattgcactggccgcggagaaatatccggagaaagtgagcgctctcgtctttgtgaacggtcttatgcccgatatcgaccacagtccagcgttcgtggtaaagaaatatagcgaagttttcactgactggaaagattcgatcttcagcaattatacctacggtaacgacacggtcaccgcggttaaattgggagatcgtctgctggagaatatcttctccatgtctccgattgaagatgtagaactggcgaaacatcgtgtccgcaaaggctccttttttctgcaagacttggataccctgccgaactttacgtcggaagggtatggttcaattcgtcgtgtgtatgtttacggcgaagaagaccgcatctttagccgcgattttcagttatggcaaattaataattataagcctgataaagtgtactgtgtaccgggtgctgaccacaagattatgatcagccgcgtcaacgagctggcccagattctccaggaagttgcaaactctgcgagcgatcttcttgcggtg

SEQ ID NO: 264 - protein, 260 aa, synthetic construct
  REGION 1..260: note = Description of Artificial Sequence: Synthetic polypeptide
MSAHFILIHSICHGAWLWYKLIPLLQSAGHTVTAIDLVASGSNPHQLEEIGTWRQYSEPLFTLIESIPEGKKVILVGEAGGGINIALAAEKYPEKVSALVFVNGLMPDIDHSPAFVVKKYSEVFTDWKDSIFSNYTYGNDTVTAVKLGDRLLENIFSMSPIEDVELAKHRVRKGSFFLQDLDTLPNFTSEGYGSIRRVYVYGEEDRIFSRDFQLWQINNYKPDKVYCVPGADHKIMISRVNELAQILQEVANSASDLLAV

SEQ ID NO: 265 - DNA, 780 bp, synthetic construct
  misc_feature 1..780: note = Description of Artificial Sequence: Synthetic polynucleotide
  source 1..780: mol_type = other DNA
atgagtgcgcattttattctgatccacagtatctgccatggcgcctggctgtggtataaactgatcccgttattacagtctgcaggtcataacgttacggcgattgatcttgtcgctagcgggagtaatcctcaccaactggaagaaattggcacatggcgccagtactcagaaccattgttcaccctgatcgaatcgattccggaaggtaagaaagtcattctggtaggagaagcggggggcggcatcaatattgcactggccgcggagaaatatccggagaaagtgagcgctctcgtctttgtgaacggtcttatgcccgatatcgatcacagtccagcgttcgtggtaaagaaatatagcgaagttttcactgactggaaagattcgatcttcagcaattatacctacggtaacgacacggtcaccgcggttgaattgggagatcgtctgctggagaatatcttctccatgtctccgattgaagatgtagaactggcgaaacatcgtgtccgcaaaggctccttttttctgcaagacttggataccctgccgaactttacgtcggaagggtatggtggtattcgtcgtgtgtatgtttacggcgaagaagacagcgtttttagccgcgattttcagttatggcaaattaataattataagcctgataaagtgtactgtgtaccgggtgctgaccacaagattatgatcagccgcgtcaacgagctggcccagattctccaggaagttgcaaactctgcgagcgatcttcttgcggtg

SEQ ID NO: 266 - protein, 260 aa, synthetic construct
  REGION 1..260: note = Description of Artificial Sequence: Synthetic polypeptide
MSAHFILIHSICHGAWLWYKLIPLLQSAGHNVTAIDLVASGSNPHQLEEIGTWRQYSEPLFTLIESIPEGKKVILVGEAGGGINIALAAEKYPEKVSALVFVNGLMPDIDHSPAFVVKKYSEVFTDWKDSIFSNYTYGNDTVTAVELGDRLLENIFSMSPIEDVELAKHRVRKGSFFLQDLDTLPNFTSEGYGGIRRVYVYGEEDSVFSRDFQLWQINNYKPDKVYCVPGADHKIMISRVNELAQILQEVANSASDLLAV

SEQ ID NO: 267 - DNA, 780 bp, synthetic construct
  misc_feature 1..780: note = Description of Artificial Sequence: Synthetic polynucleotide
  source 1..780: mol_type = other DNA
atgagtgcgcattttattctgatccacagtatctgccatggcgcctggctgtggtataaactgatcccgttattacagtctgcaggtcataccgttacggcgattgatcttgtcgctagcgggagtaatcctcaccaactggaagaaattggcacatggcgccagtactcagaaccattgttcaccctgatcgaatcgattccggaaggtaagaaagtcattctggtaggagaagcggggggcggcatcaatattgcactggccgcggagaaatatccggagaaagtgagcgctctcgtctttgtgaacggtcttatgcccgatatcgatcacagtccagcgttcgtggtaaagaaatatagcgaagttttcactgactggaaagattcgatcttcagcaattatacctacggtaacgacacggtcaccgcggttaaattgggagatcgtctgctggagaatatcttctccatgtctccgattgaagatgtagaactggcgaaacatcgtgtccgcaaaggctccttttttctgcaagacttggataccctgccgaactttacgtcgcgcgggtatggtggtattcgtcgtgtgtatgtttacggcgaagaagacagcgtttttagccgcgattttcagttatggcaaattaataattataagcctgataaagtgtactgtgtaccgggtgctgaccacaagattatgatcagccgcgtcaacgagctggcccagattctccaagaagttgcaaactctgcgagcgatcttcttgcggtg

SEQ ID NO: 268 - protein, 260 aa, synthetic construct
  REGION 1..260: note = Description of Artificial Sequence: Synthetic polypeptide
MSAHFILIHSICHGAWLWYKLIPLLQSAGHTVTAIDLVASGSNPHQLEEIGTWRQYSEPLFTLIESIPEGKKVILVGEAGGGINIALAAEKYPEKVSALVFVNGLMPDIDHSPAFVVKKYSEVFTDWKDSIFSNYTYGNDTVTAVKLGDRLLENIFSMSPIEDVELAKHRVRKGSFFLQDLDTLPNFTSRGYGGIRRVYVYGEEDSVFSRDFQLWQINNYKPDKVYCVPGADHKIMISRVNELAQILQEVANSASDLLAV

SEQ ID NO: 269 - DNA, 780 bp, synthetic construct
  misc_feature 1..780: note = Description of Artificial Sequence: Synthetic polynucleotide
  source 1..780: mol_type = other DNA
atgagtgcgcattttattctgatccacagtatctgccatggcgcctggctgtggtataaactgatcccgttattacagtctgcaggtcataccgttacggcgattgatcttgtcgctagcgggagtaatcctcaccaactggaagaaattggcacatggcgccagtactcagaaccattgttcaccctgatcgaatcgattccggaaggtaagaaagtcattctggtaggagaagcggggggcggcatcaatattgcactggccgcggagaaatatccggagaaagtgagcgctctcgtctttgtgaacggtcttatgcccgatatcgaccacagtccagcgttcgtggtaaagaaatatagcgaagttttcactgactggaaagattcgggcttcagcaattatacctacggtaacgacacggtcaccgcggttgaattgggagatcgtaccctggagaatatcttctccatgtctccgattgaagatgtagaactggcgaaacatcgtgtccgcaaaggctccttttttctgcaagacttggataccctgccgaactttacgtcggaagggtatggtagtattcgtcgtgtgtatgtttacggcgaagaagaccgcgtttttagccgcgattttcagttatggcaaattaataattataagcctgataaagtgtactgtgtaccgggtgctgaccacaagattatgatcagccgcgtcaacgagctggcccagattctccaggaagttgcaaactctgcgagcgatcttcttgcggtg

SEQ ID NO: 270 - protein, 260 aa, synthetic construct
  REGION 1..260: note = Description of Artificial Sequence: Synthetic polypeptide
MSAHFILIHSICHGAWLWYKLIPLLQSAGHTVTAIDLVASGSNPHQLEEIGTWRQYSEPLFTLIESIPEGKKVILVGEAGGGINIALAAEKYPEKVSALVFVNGLMPDIDHSPAFVVKKYSEVFTDWKDSGFSNYTYGNDTVTAVELGDRTLENIFSMSPIEDVELAKHRVRKGSFFLQDLDTLPNFTSEGYGSIRRVYVYGEEDRVFSRDFQLWQINNYKPDKVYCVPGADHKIMISRVNELAQILQEVANSASDLLAV

SEQ ID NO: 271 - DNA, 780 bp, synthetic construct
  misc_feature 1..780: note = Description of Artificial Sequence: Synthetic polynucleotide
  source 1..780: mol_type = other DNA
atgagtgcgcattttattctgatccacagtatctgccatggcgcctggctgtggtataaactgatcccgttattacagtctgcaggtcataccgttacggcgattgatcttgtcgctagcgggagtaatcctcaccaactggaagatattggcacatggggtcagtactcagaaccattgttcaccctgatcgaatcgattccggaaggtaagaaagtcattctggtaggagaagcggggggcggcatcaatattgcactggccgcggagaaatatccggagaaagtgagcgctctcgtctttgtgaacggtcttatgcccgatatcgaccacagtccagcgttcgtggtaaagaaatatagcgaagttttcactgactggaaagattcgatcttcagcaattatacctacggtaacgacacggtcaccgcggttaaattgggagatcgtaccctggagaatatcttctccatgtctccgattgaagatgtagaactggcgaaacatcgtgtccgcaaaggctccttttttctgcaagacttggatcgcctgccgaactttacgtcgcgcgggtatggtagtattcgtcgtgtgtatgtttacggcgaagaagaccgcatctttagccgcgattttcagttatggcaaattaataattataagcctgataaagtgtactgtgtaccgggtgctgaccacaagattatgatcagccgcgtcaacgagctggcccagattctccaggaagttgcaaactctgcgagcgatcttcttgcggtg

SEQ ID NO: 272 - protein, 260 aa, synthetic construct
  REGION 1..260: note = Description of Artificial Sequence: Synthetic polypeptide
MSAHFILIHSICHGAWLWYKLIPLLQSAGHTVTAIDLVASGSNPHQLEDIGTWGQYSEPLFTLIESIPEGKKVILVGEAGGGINIALAAEKYPEKVSALVFVNGLMPDIDHSPAFVVKKYSEVFTDWKDSIFSNYTYGNDTVTAVKLGDRTLENIFSMSPIEDVELAKHRVRKGSFFLQDLDRLPNFTSRGYGSIRRVYVYGEEDRIFSRDFQLWQINNYKPDKVYCVPGADHKIMISRVNELAQILQEVANSASDLLAV

SEQ ID NO: 273 - DNA, 780 bp, synthetic construct
  misc_feature 1..780: note = Description of Artificial Sequence: Synthetic polynucleotide
  source 1..780: mol_type = other DNA
atgagtgcgcattttattctgatccacagtatctgccatggcgcctggctgtggtataaactgatcccgttattacagtctgcaggtcataacgttacggcgattgatcttgtcgctagcgggagtaatcctcaccaactggaagatattggcacatggggtcagtactcagaaccattgttcaccctgatcgaatcgattccggaaggtaagaaagtcattctggtaggagaagcggggggcggcatcaatattgcactggccgcggagaaatatccggagaaagtgagcgctctcgtctttgtgaacggtcttatgcccgatatcgaccacagtccagcgttcgtggtaaagaaatatagcgaagttttcactgactggaaagattcgattttcagcaattatacctacggtaacgacacggtcaccgcggttgaattgggagatcgtaccctggagaatatcttctccatgtctccgattgaagatgtagaactggcgaaacatcgtgtccgcaaaggctccttttttctgcaagacttggataccctgccgaactttacgtcggaagggtatggtagtattcgtcgtgtgtatgtttacggcgaagaagaccaggtttttagccgcgattttcagttatggcaaattaataattataagcctgataaagtgtactgtgtaccgggtgctgaccacaagattatgatcagccgcgtcaacgagctggcccagattctccaggaagttgcaaactctgcgagcgatcttcttgcggtg

SEQ ID NO: 274 - protein, 260 aa, synthetic construct
  REGION 1..260: note = Description of Artificial Sequence: Synthetic polypeptide
MSAHFILIHSICHGAWLWYKLIPLLQSAGHNVTAIDLVASGSNPHQLEDIGTWGQYSEPLFTLIESIPEGKKVILVGEAGGGINIALAAEKYPEKVSALVFVNGLMPDIDHSPAFVVKKYSEVFTDWKDSIFSNYTYGNDTVTAVELGDRTLENIFSMSPIEDVELAKHRVRKGSFFLQDLDTLPNFTSEGYGSIRRVYVYGEEDQVFSRDFQLWQINNYKPDKVYCVPGADHKIMISRVNELAQILQEVANSASDLLAV

SEQ ID NO: 275 - DNA, 780 bp, synthetic construct
  misc_feature 1..780: note = Description of Artificial Sequence: Synthetic polynucleotide
  source 1..780: mol_type = other DNA
atgagtgcgcattttattctgatccacagtatctgccatggcgcctggctgtggtataaactgatcccgttattacagtctgcaggtcataccgttacggcgattgatcttgtcgctagcgggagtaatcctcaccaactggaagaaattggcacatggcgccagtactcagaaccattgttcaccctgatcgaatcgattccggaaggtaagaaagtcattctggtaggagaagcggggggcggcatcaatattgcactggccgcggagaaatatccggagaaagtgagcgctctcgtctttgtgaacggtcttatgcccgatatcgaccacagtccagcgttcgtggtaaagaaatatagcgaagttttcactgactggaaagattcgatcttcagcaattatacctacggtaacgacacggtcaccgcggttgaattgggagatcgtctgctggagaatatcttctccatgtctccgattgaagatgtagaactggcgaaacatcgtgtccgcaaaggctccttttttctgcaagacttggataccctgccgaactttacgtcggaagggtatggttcaattcgtcgtgtgtatgtttacggcgaagaagacagcatttttagccgcgattttcagttatggcaaattaataattataagcctgataaagtgtactgtgtaccgggtgctgaccacaagattatgatcagccgcgtcaacgagctggcccagattctccaagaagttgcaaactctgcgagcgatcttcttgcggtg

SEQ ID NO: 276 - protein, 260 aa, synthetic construct
  REGION 1..260: note = Description of Artificial Sequence: Synthetic polypeptide
MSAHFILIHSICHGAWLWYKLIPLLQSAGHTVTAIDLVASGSNPHQLEEIGTWRQYSEPLFTLIESIPEGKKVILVGEAGGGINIALAAEKYPEKVSALVFVNGLMPDIDHSPAFVVKKYSEVFTDWKDSIFSNYTYGNDTVTAVELGDRLLENIFSMSPIEDVELAKHRVRKGSFFLQDLDTLPNFTSEGYGSIRRVYVYGEEDSIFSRDFQLWQINNYKPDKVYCVPGADHKIMISRVNELAQILQEVANSASDLLAV

SEQ ID NO: 277 - DNA, 780 bp, synthetic construct
  misc_feature 1..780: note = Description of Artificial Sequence: Synthetic polynucleotide
  source 1..780: mol_type = other DNA
atgagtgcgcattttattctgatccacagtatctgccatggcgcctggctgtggtataaactgatcccgttattacagtctgcaggtcataccgttacggcgattgatcttgtcgctagcgggagtaatcctcaccaactggaagaaattggcacatggggtcagtactcagaaccattgttcaccctgatcgaatcgattccggaaggtaagaaagtcattctggtaggagaagcggggggcggcatcaatattgcactggccgcggagaaatatccggagaaagtgagcgctctcgtctttgtgaacggtcttatgcccgatatcgatcacagtccagcgttcgtggtaaagaaatatagcgaagttttcactgactggaaagattcgatcttcagcaattatacctacggtaacgacacggtcaccgcggttaaattgggagatcgtaccctggagaatatcttctccatgtctccgattgaagatgtagaactggcgaaacatcgtgtccgcaaaggctccttttttctgcaagacttggataccctgccgaactttacgtcggaagggtatggtggtattcgtcgtgtgtatgtttacggcgaagaagaccagatttttagccgcgattttcagttatggcaaattaataattataagcctgataaagtgtactgtgtaccgggtgctgaccacaagattatgatcagccgcgtcaacgagctggcccagattctccaagaagttgcaaactctgcgagcgatcttcttgcggtg

SEQ ID NO: 278 - protein, 260 aa, synthetic construct
  REGION 1..260: note = Description of Artificial Sequence: Synthetic polypeptide
MSAHFILIHSICHGAWLWYKLIPLLQSAGHTVTAIDLVASGSNPHQLEEIGTWGQYSEPLFTLIESIPEGKKVILVGEAGGGINIALAAEKYPEKVSALVFVNGLMPDIDHSPAFVVKKYSEVFTDWKDSIFSNYTYGNDTVTAVKLGDRTLENIFSMSPIEDVELAKHRVRKGSFFLQDLDTLPNFTSEGYGGIRRVYVYGEEDQIFSRDFQLWQINNYKPDKVYCVPGADHKIMISRVNELAQILQEVANSASDLLAV

SEQ ID NO: 279 - DNA, 780 bp, synthetic construct
  misc_feature 1..780: note = Description of Artificial Sequence: Synthetic polynucleotide
  source 1..780: mol_type = other DNA
atgagtgcgcattttattctgatccacagtatctgccatggcgcctggctgtggtataaactgatcccgttattacagtctgcaggtcataacgttacggcgattgatcttgtcgctagcgggagtaatcctcaccaactggaagatattggcacatggggtcagtactcagaaccattgttcaccctgatcgaatcgattccggaaggtaagaaagtcattctggtaggagaagcggggggcggcatcaatattgcactggccgcggagaaatatccggagaaagtgagcgctctcgtctttgtgaacggtcttatgcccgatatcgaccacagtccagcgttcgtggtaaagaaatatagcgaagttttcactgactggaaagattcgatcttcagcaattatacctacggtaacgacacggtcaccgcggttaaattgggagatcgtaccctggagaatatcttctccatgtctccgattgaagatgtagaactggcgaaacatcgtgtccgcaaaggctccttttttctgcaagacttggataccctgccgaactttacgtcggaagggtatggtagtattcgtcgtgtgtatgtttacggcgaagaagaccagatttttagccgcgattttcagttatggcaaattaataattataagcctgataaagtgtactgtgtaccgggtgctgaccacaagattatgatcagccgcgtcaacgagctggcccagattctccaagaagttgcaaactctgcgccggatctggcggtgtcg

SEQ ID NO: 280 - protein, 260 aa, synthetic construct
  REGION 1..260: note = Description of Artificial Sequence: Synthetic polypeptide
MSAHFILIHSICHGAWLWYKLIPLLQSAGHNVTAIDLVASGSNPHQLEDIGTWGQYSEPLFTLIESIPEGKKVILVGEAGGGINIALAAEKYPEKVSALVFVNGLMPDIDHSPAFVVKKYSEVFTDWKDSIFSNYTYGNDTVTAVKLGDRTLENIFSMSPIEDVELAKHRVRKGSFFLQDLDTLPNFTSEGYGSIRRVYVYGEEDQIFSRDFQLWQINNYKPDKVYCVPGADHKIMISRVNELAQILQEVANSAPDLAVS

SEQ ID NO: 281 - DNA, 780 bp, synthetic construct
  misc_feature 1..780: note = Description of Artificial Sequence: Synthetic polynucleotide
  source 1..780: mol_type = other DNA
atgagtgcgcattttattctgatccacagtatctgccatggcgcctggctgtggtataaactgatcccgttattacagtctgcaggtcataccgttacggcgattgatcttgtcgctagcgggagtaatcctcaccaactggaagatattggcacatggcgtcagtactcagaaccattgttcaccctgatcgaatcgattccggaaggtaagaaagtcattctggtaggagaagcggggggcggcatcaatattgcactggccgcggagaaatatccggagaaagtgagcgctctcgtctttgtgaacggtcttatgcccgatatcgatcacagtccagcgttcgtggtaaagaaatatagcgaagttttcactgactggaaagattcgatcttcagcaattatacctacggtaacgacacggtcaccgcggttgaattgggagatcgtctgctggagaatatcttctccatgtctccgattgaagatgtagaactggcgaaacatcgtgtccgcaaaggctccttttttctgcaagacttggatcgcctgccgaactttacgtcggaagggtatggtagtattcgtcgtgtgtatgtttacggcgaagaagaccaggtttttagccgcgattttcagttatggcaaattaataattataagcctgataaagtgtactgtgtaccgggtgctgaccacaagattatgatcagccgcgtcaacgagctggcccagattctccaggaagttgcaaactctgcgagcgatcttcttgcggtg

SEQ ID NO: 282 - protein, 260 aa, synthetic construct
  REGION 1..260: note = Description of Artificial Sequence: Synthetic polypeptide
MSAHFILIHSICHGAWLWYKLIPLLQSAGHTVTAIDLVASGSNPHQLEDIGTWRQYSEPLFTLIESIPEGKKVILVGEAGGGINIALAAEKYPEKVSALVFVNGLMPDIDHSPAFVVKKYSEVFTDWKDSIFSNYTYGNDTVTAVELGDRLLENIFSMSPIEDVELAKHRVRKGSFFLQDLDRLPNFTSEGYGSIRRVYVYGEEDQVFSRDFQLWQINNYKPDKVYCVPGADHKIMISRVNELAQILQEVANSASDLLAV

SEQ ID NO: 283 - DNA, 780 bp, synthetic construct
  misc_feature 1..780: note = Description of Artificial Sequence: Synthetic polynucleotide
  source 1..780: mol_type = other DNA
atgagtgcgcattttattctgatccacagtatctgccatggcgcctggctgtggtataaactgatcccgttattacagtctgcaggtcataccgttacggcgattgatcttgtcgctagcgggagtaatcctcaccaactggaagaaattggcacatggggtcagtactcagaaccattgttcaccctgatcgaatcgattccggaaggtaagaaagtcattctggtaggagaagcggggggcggcatcaatattgcactggccgcggagaaatatccggagaaagtgagcgctctcgtctttgtgaacggtcttatgcccgatatcgaccacagtccagcgttcgtggtaaagaaatatagcgaagttttcactgactggaaagattcgatcttcagcaattatacctacggtaacgacacggtcaccgcggttaaattgggagatcgtctgctggagaatatcttctccatgtctccgattgaagatgtagaactggcgaaacatcgtgtccgcaaaggctccttttttctgcaagacttggataccctgccgaactttacgtcggaagggtatggtggtattcgtcgtgtgtatgtttacggcgaagaagaccaggtttttagccgcgattttcagttatggcaaattaataattataagcctgataaagtgtactgtgtaccgggtgctgaccacaagattatgatcagccgcgtcaacgagctggcccagattctccaggaagttgcaaactctgcgagcgatcttcttgcggtg

SEQ ID NO: 284 - protein, 260 aa, synthetic construct
  REGION 1..260: note = Description of Artificial Sequence: Synthetic polypeptide
MSAHFILIHSICHGAWLWYKLIPLLQSAGHTVTAIDLVASGSNPHQLEEIGTWGQYSEPLFTLIESIPEGKKVILVGEAGGGINIALAAEKYPEKVSALVFVNGLMPDIDHSPAFVVKKYSEVFTDWKDSIFSNYTYGNDTVTAVKLGDRLLENIFSMSPIEDVELAKHRVRKGSFFLQDLDTLPNFTSEGYGGIRRVYVYGEEDQVFSRDFQLWQINNYKPDKVYCVPGADHKIMISRVNELAQILQEVANSASDLLAV

SEQ ID NO: 285 - DNA, 780 bp, synthetic construct
  misc_feature 1..780: note = Description of Artificial Sequence: Synthetic polynucleotide
  source 1..780: mol_type = other DNA
atgagtgcgcattttattctgatccacagtatctgccatggcgcctggctgtggtataaactgatcccgttattacagtctgcaggtcataccgttacggcgattgatcttgtcgctagcgggagtaatcctcaccaactggaagaaattggcacatggcgccagtactcagaaccattgttcaccctgatcgaatcgattccggaaggtaagaaagtcattctggtaggagaagcggggggcggcatcaatattgcactggccgcggagaaatatccggagaaagtgagcgctctcgtctttgtgaacggtcttatgcccgatatcgatcacagtccagcgttcgtggtaaagaaatatagcgaagttttcactgactggaaagattcgatcttcagcaattatacctacggtaacgacacggtcaccgcggttgaattgggagatcgtaccctggagaatatcttctccatgtctccgattgaagatgtagaactggcgaaacatcgtgtccgcaaaggctccttttttctgcaagacttggataccctgccgaactttacgtcgcgcgggtatggtagtattcgtcgtgtgtatgtttacggcgaagaagacagcatttttagccgcgattttcagttatggcaaattaataattataagcctgataaagtgtactgtgtaccgggtgctgaccacaagattatgatcagccgcgtcaacgagctggcccagattctcggggaagttgcaaactctgcgtcggatcttcttgcggtg

SEQ ID NO: 286 - protein, 260 aa, synthetic construct
  REGION 1..260: note = Description of Artificial Sequence: Synthetic polypeptide
MSAHFILIHSICHGAWLWYKLIPLLQSAGHTVTAIDLVASGSNPHQLEEIGTWRQYSEPLFTLIESIPEGKKVILVGEAGGGINIALAAEKYPEKVSALVFVNGLMPDIDHSPAFVVKKYSEVFTDWKDSIFSNYTYGNDTVTAVELGDRTLENIFSMSPIEDVELAKHRVRKGSFFLQDLDTLPNFTSRGYGSIRRVYVYGEEDSIFSRDFQLWQINNYKPDKVYCVPGADHKIMISRVNELAQILGEVANSASDLLAV

SEQ ID NO: 287 - DNA, 780 bp, synthetic construct
  misc_feature 1..780: note = Description of Artificial Sequence: Synthetic polynucleotide
  source 1..780: mol_type = other DNA
atgagtgcgcattttattctgatccacagtatctgccatggcgcctggctgtggtataaactgatcccgttattacagtctgcaggtcataacgttacggcgattgatcttgtcgctagcgggagtaatcctcaccaactggaagatattggcacatggcgtcagtactcagaaccattgttcaccctgatcgaatcgattccggaaggtaagaaagtcattctggtaggagaagcggggggcggcatcaatattgcactggccgcggagaaatatccggagaaagtgagcgctctcgtctttgtgaacggtcttatgcccgatatcgaccacagtccagcgttcgtggtaaagaaatatagcgaagttttcactgactggaaagattcgatcttcagcaattatacctacggtaacgacacggtcaccgcggttgaattgggagatcgtctgctggagaatatcttctccatgtctccgattgaagatgtagaactggcgaaacatcgtgtccgcaaaggctccttttttctgcaagacttggatcgcctgccgaactttacgtcgcgcgggtatggtagtattcgtcgtgtgtatgtttacggcgaagaagaccaggtttttagccgcgattttcagttatggcaaattaataattataagcctgataaagtgtactgtgtaccgggtgctgaccacaagattatgatcagccgcgtcaacgagctggcccagattctcggggaagttgcaaactctgcgagcgatcttcttgcggtg

SEQ ID NO: 288 - protein, 260 aa, synthetic construct
  REGION 1..260: note = Description of Artificial Sequence: Synthetic polypeptide
MSAHFILIHSICHGAWLWYKLIPLLQSAGHNVTAIDLVASGSNPHQLEDIGTWRQYSEPLFTLIESIPEGKKVILVGEAGGGINIALAAEKYPEKVSALVFVNGLMPDIDHSPAFVVKKYSEVFTDWKDSIFSNYTYGNDTVTAVELGDRLLENIFSMSPIEDVELAKHRVRKGSFFLQDLDRLPNFTSRGYGSIRRVYVYGEEDQVFSRDFQLWQINNYKPDKVYCVPGADHKIMISRVNELAQILGEVANSASDLLAV

SEQ ID NO: 289 - DNA, 780 bp, synthetic construct
  misc_feature 1..780: note = Description of Artificial Sequence: Synthetic polynucleotide
  source 1..780: mol_type = other DNA
atgagtgcgcattttattctgatccacagtatctgccatggcgcctggctgtggtataaactgatcccgttattacagtctgcaggtcataacgttacggcgattgatcttgtcgctagcgggagtaatcctcaccaactggaagaaattggcacatggcgtcagtactcagaaccattgttcaccctgatcgaatcgattccggaaggtaagaaagtcattctggtaggagaagcggggggcggcatcaatattgcactggccgcggagaaatatccggagaaagtgagcgctctcgtctttgtgaacggtcttatgcccgatatcgaccacagtccagcgttcgtggtaaagaaatatagcgaagttttcactgactggaaagattcgattttcagcaattatacctacggtaacgacacggtcaccgcggttaaattgggagatcgtaccctggagaatatcttctccatgtctccgattgaagatgtagaactggcgaaacatcgtgtccgcaaaggctccttttttctgcaagacttggataccctgccgaactttacgtcggaagggtatggttcaattcgtcgtgtgtatgtttacggcgaagaagaccaggtttttagccgcgattttcagttatggcaaattaataattataagcctgataaagtgtactgtgtaccgggtgctgaccacaagattatgatcagccgcgtcaacgagctggcccagattctcggggaagttgcaaactctgcgagcgatcttctggcggtg

SEQ ID NO: 290 - protein, 260 aa, synthetic construct
  REGION 1..260: note = Description of Artificial Sequence: Synthetic polypeptide
MSAHFILIHSICHGAWLWYKLIPLLQSAGHNVTAIDLVASGSNPHQLEEIGTWRQYSEPLFTLIESIPEGKKVILVGEAGGGINIALAAEKYPEKVSALVFVNGLMPDIDHSPAFVVKKYSEVFTDWKDSIFSNYTYGNDTVTAVKLGDRTLENIFSMSPIEDVELAKHRVRKGSFFLQDLDTLPNFTSEGYGSIRRVYVYGEEDQVFSRDFQLWQINNYKPDKVYCVPGADHKIMISRVNELAQILGEVANSASDLLAV

SEQ ID NO: 291 - DNA, 780 bp, synthetic construct
  misc_feature 1..780: note = Description of Artificial Sequence: Synthetic polynucleotide
  source 1..780: mol_type = other DNA
atgagtgcgcattttattctgatccacagtatctgccatggcgcctggctgtggtataaactgatcccgttattacagtctgcaggtcataacgttacggcgattgatcttgtcgctagcgggagtaatcctcaccaactggaagatattggcacatggggtcagtactcagaaccattgttcaccctgatcgaatcgattccggaaggtaagaaagtcattctggtaggagaagcggggggcggcatcaatattgcactggccgcggagaaatatccggagaaagtgagcgctctcgtctttgtgaacggtcttatgcccgatatcgatcacagtccagcgttcgtggtaaagaaatatagcgaagttttcactgactggaaagattcgattttcagcaattatacctacggtaacgacacggtcaccgcggttaaattgggagatcgtctgctggagaatatcttctccatgtctccgattgaagatgtagaactggcgaaacatcgtgtccgcaaaggctccttttttctgcaagacttggataccctgccgaactttacgtcggaagggtatggtagtattcgtcgtgtgtatgtttacggcgaagaagacagcgtttttagccgcgattttcagttatggcaaattaataattataagcctgataaagtgtactgtgtaccgggtgctgaccacaagattatgatcagccgcgtcaacgagctggcccagattctcggggaagttgcaaactctgcgagcgatcttcttgcggtg

SEQ ID NO: 292 - protein, 260 aa, synthetic construct
  REGION 1..260: note = Description of Artificial Sequence: Synthetic polypeptide
MSAHFILIHSICHGAWLWYKLIPLLQSAGHNVTAIDLVASGSNPHQLEDIGTWGQYSEPLFTLIESIPEGKKVILVGEAGGGINIALAAEKYPEKVSALVFVNGLMPDIDHSPAFVVKKYSEVFTDWKDSIFSNYTYGNDTVTAVKLGDRLLENIFSMSPIEDVELAKHRVRKGSFFLQDLDTLPNFTSEGYGSIRRVYVYGEEDSVFSRDFQLWQINNYKPDKVYCVPGADHKIMISRVNELAQILGEVANSASDLLAV

SEQ ID NO: 293 - DNA, 762 bp, synthetic construct
  misc_feature 1..762: note = Description of Artificial Sequence: Synthetic polynucleotide
  source 1..762: mol_type = other DNA
atgagtgcgcattttattctgatccacagtatctgccatggcgcctggctgtggtataaactgatcccgttattacagtctgcaggtcataccgttacggcgattgatcttgtcgctagcgggagtaatcctcaccaactggaagatattggcacatggcgtcagtactcagaaccattgttcaccctgatcgaatcgattccggaaggtaagaaagtcattctggtaggagaagcggggggcggcatcaatattgcactggccgcggagaaatatccggagaaagtgagcgctctcgtctttgtgaacggtcttatgcccgatatcgaccacagtccagcgttcgtggtaaagaaatatagcgaagttttcactgactggaaagattcgatcttcagcaattatacctacggtaacgacacggtcaccgcggttaaattgggagatcgtaccctggagaatatcttctccatgtctccgattgaagatgtagaactggcgaaacatcgtgtccgcaaaggctccttttttctgcaagacttggataccctgccgaactttacgtcggaagggtatggttcaattcgtcgtgtgtatgtttacggcgaagaagaccgcgtttttagccgcgattttcagttatggcaaattaataattataagcctgataaagtgtactgtgtaccgggtgctgaccacaagattatgatcagccgcgtcaacgagctggcccagattctccaagaagttgcaaactctgcg

SEQ ID NO: 294 - protein, 254 aa, synthetic construct
  REGION 1..254: note = Description of Artificial Sequence: Synthetic polypeptide
MSAHFILIHSICHGAWLWYKLIPLLQSAGHTVTAIDLVASGSNPHQLEDIGTWRQYSEPLFTLIESIPEGKKVILVGEAGGGINIALAAEKYPEKVSALVFVNGLMPDIDHSPAFVVKKYSEVFTDWKDSIFSNYTYGNDTVTAVKLGDRTLENIFSMSPIEDVELAKHRVRKGSFFLQDLDTLPNFTSEGYGSIRRVYVYGEEDRVFSRDFQLWQINNYKPDKVYCVPGADHKIMISRVNELAQILQEVANSA

SEQ ID NO: 295 - DNA, 765 bp, synthetic construct
  misc_feature 1..765: note = Description of Artificial Sequence: Synthetic polynucleotide
  source 1..765: mol_type = other DNA
atgagtgcgcattttattctgatccacagtatctgccatggcgcctggctgtggtataaactgatcccgttattacagtctgcaggtcataccgttacggcgattgatcttgtcgctagcgggagtaatcctcaccaactggaagaaattggcacatggggtcagtactcagaaccattgttcaccctgatcgaatcgattccggaaggtaagaaagtcattctggtaggagaagcggggggcggcatcaatattgcactggccgcggagaaatatccggagaaagtgagcgctctcgtctttgtgaacggtcttatgcccgatatcgaccacagtccagcgttcgtggtaaagaaatatagcgaagttttcactgactggaaagattcgatcttcagcaattatacctacggtaacgacacggtcaccgcggttgaattgggagatcgtctgctggagaatatcttctccatgtctccgattgaagatgtagaactggcgaaacatcgtgtccgcaaaggctccttttttctgcaagacttggatacgctgccgaactttacgtcgcgcgggtatggtggtattcgtcgtgtgtatgtttacggcgaagaagacagcatttttagccgcgattttcagttatggcaaattaataattataagcctgataaagtgtactgtgtaccgggtgctgaccacaagattatgatcagccgcgtcaacgagctggcccagattctcggggaagttgcaaactctgcgtcg

SEQ ID NO: 296 - protein, 255 aa, synthetic construct
  REGION 1..255: note = Description of Artificial Sequence: Synthetic polypeptide
MSAHFILIHSICHGAWLWYKLIPLLQSAGHTVTAIDLVASGSNPHQLEEIGTWGQYSEPLFTLIESIPEGKKVILVGEAGGGINIALAAEKYPEKVSALVFVNGLMPDIDHSPAFVVKKYSEVFTDWKDSIFSNYTYGNDTVTAVELGDRLLENIFSMSPIEDVELAKHRVRKGSFFLQDLDTLPNFTSRGYGGIRRVYVYGEEDSIFSRDFQLWQINNYKPDKVYCVPGADHKIMISRVNELAQILGEVANSAS

SEQ ID NO: 297 - DNA, 780 bp, synthetic construct
  misc_feature 1..780: note = Description of Artificial Sequence: Synthetic polynucleotide
  source 1..780: mol_type = other DNA
atgagtgcgcattttattctgatccacagtatctgccatggcgcctggctgtggtataaactgatcccgttattacagtctgcaggtcataccgttacggcgattgatcttgtcgctagcgggagtaatcctcaccaactggaagaaattggcacatggcgtcagtactcagaaccattgttcaccctgatcgaatcgattccggaaggtaagaaagtcattctggtaggagaagcggggggcggcatcaatattgcactggccgcggagaaatatccggagaaagtgagcgctctcgtctttgtgaacggtcttatgcccgatatcgaccacagtccagcgttcgtggtaaagaaatatagcgaagttttcactgactggaaagattcgattttcagcaattatacctacggtaacgacacggtcaccgcggttgaattgggagatcgtctgctggagaatatcttctccaattctccgattgaagatgtagaactggcgaaacatcgtgtccgcaaaggctccttttttctgcaagacttggatacgctgccgaactttacgtcggaagggtatggttcaattcgtcgtgtgtatgtttacggcgaagaagaccagatttttagccgcgattttcagttatggcaaattaataattataagcctgataaagtgtactgtgtaccgggtgctgaccacaagattatgatcagccgcgtcaacgagctggcccagattctcggggaagttgcaaactctgcgagcgatcttcttgcggtg

SEQ ID NO: 298 - protein, 260 aa, synthetic construct
  REGION 1..260: note = Description of Artificial Sequence: Synthetic polypeptide
MSAHFILIHSICHGAWLWYKLIPLLQSAGHTVTAIDLVASGSNPHQLEEIGTWRQYSEPLFTLIESIPEGKKVILVGEAGGGINIALAAEKYPEKVSALVFVNGLMPDIDHSPAFVVKKYSEVFTDWKDSIFSNYTYGNDTVTAVELGDRLLENIFSNSPIEDVELAKHRVRKGSFFLQDLDTLPNFTSEGYGSIRRVYVYGEEDQIFSRDFQLWQINNYKPDKVYCVPGADHKIMISRVNELAQILGEVANSASDLLAV

SEQ ID NO: 299 - DNA, 780 bp, synthetic construct
  misc_feature 1..780: note = Description of Artificial Sequence: Synthetic polynucleotide
  source 1..780: mol_type = other DNA
atgagtgcgcattttattctgatccacagtatcgggcatggcgcctggctgtggtataaactgatcccgttattacagtctgcaggtcataacgttacggcgattgatcttgtcgctagcgggagtaatcctcaccaactggaagaaattggcacatggcgccagtactcagaaccattgttcaccctgatcgaatcgattccggaaggtaagaaagtcattctggtaggagaagcggggggcggcatcaatattgcactggccgcggagaaatatccggagaaagtgagcgctctcgtctttgtgaacggtcttatgcccgatatcgatcacagtccagcgttcgtggtaaagaaatatagcgaagttttcactgactggaaagattcgatcttcagcaattatacctacggtaacgacacggtcaccgcggttgaattgggagatcgtctgctggagaatatcttctccatgtctccgattgaagatgtagaactggcgaaacatcgtgtccgcaaaggctccttttttctgcaagacttggataccctgccgaactttacgtcggaagggtatggttcaattcgtcgtgtgtatgtttacggcgaagaagaccgcatctttagccgcgattttcagttatggcaaattaataattataagcctgataaagtgtactgtgtaccgggtgctgaccacaagattatgatcagccgcgtcaacgagctggcccagattctccaagaagttgcaaactctgcgagcgatcttcttgcggtg

SEQ ID NO: 300 - protein, 260 aa, synthetic construct
  REGION 1..260: note = Description of Artificial Sequence: Synthetic polypeptide
MSAHFILIHSIGHGAWLWYKLIPLLQSAGHNVTAIDLVASGSNPHQLEEIGTWRQYSEPLFTLIESIPEGKKVILVGEAGGGINIALAAEKYPEKVSALVFVNGLMPDIDHSPAFVVKKYSEVFTDWKDSIFSNYTYGNDTVTAVELGDRLLENIFSMSPIEDVELAKHRVRKGSFFLQDLDTLPNFTSEGYGSIRRVYVYGEEDRIFSRDFQLWQINNYKPDKVYCVPGADHKIMISRVNELAQILQEVANSASDLLAV

SEQ ID NO: 301 - DNA, 780 bp, synthetic construct
  misc_feature 1..780: note = Description of Artificial Sequence: Synthetic polynucleotide
  source 1..780: mol_type = other DNA
atgagtgcgcattttattctgatccacagtatctgccatggcgcctggctgtggtataaactgatcccgttattacagtctgcaggtcataacgttacggcgattgatcttgtcgctagcgggagtaatcctcaccaactggaagaaattggcacatggcgccagtactcagaaccattgttcaccctgatcgaatcgattccggaaggtaagaaagtcattctggtaggagaagcggggggcggcatcaatattgcactggccgcggagaaatatccggagaaagtgagcgctctcgtctttgtgaacggtcttatgcccgatatcgatcacagtccagcgttccaggtaaagaaatatagcgaagttttcactgactggaaagattcgatcttcagcaattatacctacggtaacgacacggtcaccgcggttgaattgggagatcgtctgctggagaatatcttctccatgtctccgattgaagatgtagaactggcgaaacatcgtgtccgcaaaggctccttttttctgcaagacttggataccctgccgaactttacgtcggaagggtatggttcaattcgtcgtgtgtatgtttacggcgaagaagaccgcatctttagccgcgattttcagttatggcaaattaataattataagcctgataaagtgtactgtgtaccgggtgctgaccacaagattatgatcagccgcgtcaacgagctggcccagattctccaagaagttgcaaactctgcgagcgatcttcttgcggtg

SEQ ID NO: 302 - protein, 260 aa, synthetic construct
  REGION 1..260: note = Description of Artificial Sequence: Synthetic polypeptide
MSAHFILIHSICHGAWLWYKLIPLLQSAGHNVTAIDLVASGSNPHQLEEIGTWRQYSEPLFTLIESIPEGKKVILVGEAGGGINIALAAEKYPEKVSALVFVNGLMPDIDHSPAFQVKKYSEVFTDWKDSIFSNYTYGNDTVTAVELGDRLLENIFSMSPIEDVELAKHRVRKGSFFLQDLDTLPNFTSEGYGSIRRVYVYGEEDRIFSRDFQLWQINNYKPDKVYCVPGADHKIMISRVNELAQILQEVANSASDLLAV

SEQ ID NO: 303 - DNA, 780 bp, synthetic construct
  misc_feature 1..780: note = Description of Artificial Sequence: Synthetic polynucleotide
  source 1..780: mol_type = other DNA
atgagtgcgcattttatttttatccacagtatctgccatggcgcctggctgtggtataaactgatcccgttattacagtctgcaggtcataacgttacggcgattgatcttgtcgctagcgggagtaatcctcaccaactggaagaaattggcacatggcgccagtactcagaaccattgttcaccctgatcgaatcgattccggaaggtaagaaagtcattctggtaggagaagcggggggcggcatcaatattgcactggccgcggagaaatatccggagaaagtgagcgctctcgtctttgtgaacggtcttatgcccgatatcgatcacagtccagcgttcgtggtaaagaaatatagcgaagttttcactgactggaaagattcgatcttcagcaattatacctacggtaacgacacggtcaccgcggttgaattgggagatcgtctgctggagaatatcttctccatgtctccgattgaagatgtagaactggcgaaacatcgtgtccgcaaaggctccttttttctgcaagacttggataccctgccgaactttacgtcggaagggtatggttcaattcgtcgtgtgtatgtttacggcgaagaagaccgcatctttagccgcgattttcagttatggcaaattaataattataagcctgataaagtgtactgtgtaccgggtgctgaccacaagattatgatcagccgcgtcaacgagctggcccagattctccaagaagttgcaaactctgcgagcgatcttcttgcggtg

SEQ ID NO: 304 - protein, 260 aa, synthetic construct
  REGION 1..260: note = Description of Artificial Sequence: Synthetic polypeptide
MSAHFIFIHSICHGAWLWYKLIPLLQSAGHNVTAIDLVASGSNPHQLEEIGTWRQYSEPLFTLIESIPEGKKVILVGEAGGGINIALAAEKYPEKVSALVFVNGLMPDIDHSPAFVVKKYSEVFTDWKDSIFSNYTYGNDTVTAVELGDRLLENIFSMSPIEDVELAKHRVRKGSFFLQDLDTLPNFTSEGYGSIRRVYVYGEEDRIFSRDFQLWQINNYKPDKVYCVPGADHKIMISRVNELAQILQEVANSASDLLAV

SEQ ID NO: 305 - DNA, 780 bp, synthetic construct
  misc_feature 1..780: note = Description of Artificial Sequence: Synthetic polynucleotide
  source 1..780: mol_type = other DNA
atgagtgcgcattttattctgatccacagtatctgccatggcgcctggctgtggtataaactgatcccgttattacagtctgcaggtcataacgttacggcgattgatcttgtcgctagcgggagtaatcctcaccaactggaagaaattggcacatggcgccagtactcagaaccattgttcaccctgatcgaatcgattccggaaggtaagaaagtcattctggtaggagaagcggggggcggcatcaatattgcactggccgcggagaaatatccggagaaagtgagcgctctcgtctttgtgaacggtcttatgcccgatatcgatcacagtccaggtttcgtggtaaagaaatatagcgaagttttcactgactggaaagattcgatcttcagcaattatacctacggtaacgacacggtcaccgcggttgaattgggagatcgtctgctggagaatatcttctccatgtctccgattgaagatgtagaactggcgaaacatcgtgtccgcaaaggctccttttttctgcaagacttggataccctgccgaactttacgtcggaagggtatggttcaattcgtcgtgtgtatgtttacggcgaagaagaccgcatctttagccgcgattttcagttatggcaaattaataattataagcctgataaagtgtactgtgtaccgggtgctgaccacaagattatgatcagccgcgtcaacgagctggcccagattctccaagaagttgcaaactctgcgagcgatcttcttgcggtg

SEQ ID NO: 306 - protein, 260 aa, synthetic construct
  REGION 1..260: note = Description of Artificial Sequence: Synthetic polypeptide
MSAHFILIHSICHGAWLWYKLIPLLQSAGHNVTAIDLVASGSNPHQLEEIGTWRQYSEPLFTLIESIPEGKKVILVGEAGGGINIALAAEKYPEKVSALVFVNGLMPDIDHSPGFVVKKYSEVFTDWKDSIFSNYTYGNDTVTAVELGDRLLENIFSMSPIEDVELAKHRVRKGSFFLQDLDTLPNFTSEGYGSIRRVYVYGEEDRIFSRDFQLWQINNYKPDKVYCVPGADHKIMISRVNELAQILQEVANSASDLLAV

SEQ ID NO: 307 - DNA, 780 bp, synthetic construct
  misc_feature 1..780: note = Description of Artificial Sequence: Synthetic polynucleotide
  source 1..780: mol_type = other DNA
atgagtgcgcattttattctgatccacagtatctgccatggcgcctggctgtggtataaactgatcccgttattacagtctgcaggtcataacgttacggcgattgatcttgtcgctagcgggagtaatcctcaccaactggaagaaattggcacatggcgccagtactcagaaccattgttcaccctgatcgaatcgattccggaaggtaagaaagtcattctggtaggagaagcggggggcggcatcaatattgcactggccgcggagaaatatccggagaaagtgagcgctctcgtctttgtgaacggtcttatgcccgatatcgatcacagtccagcgttcgtggtaaagaaatatagcgaagttttcactgactggaaagattcgatcttcagcaattatacctacggtaacgacacggtcaccgcggttgaattgggagatcgtgctctggagaatatcttctccatgtctccgattgaagatgtagaactggcgaaacatcgtgtccgcaaaggctccttttttctgcaagacttggataccctgccgaactttacgtcggaagggtatggttcaattcgtcgtgtgtatgtttacggcgaagaagaccgcatctttagccgcgattttcagttatggcaaattaataattataagcctgataaagtgtactgtgtaccgggtgctgaccacaagattatgatcagccgcgtcaacgagctggcccagattctccaagaagttgcaaactctgcgagcgatcttcttgcggtg

SEQ ID NO: 308 - protein, 260 aa, synthetic construct
  REGION 1..260: note = Description of Artificial Sequence: Synthetic polypeptide
MSAHFILIHSICHGAWLWYKLIPLLQSAGHNVTAIDLVASGSNPHQLEEIGTWRQYSEPLFTLIESIPEGKKVILVGEAGGGINIALAAEKYPEKVSALVFVNGLMPDIDHSPAFVVKKYSEVFTDWKDSIFSNYTYGNDTVTAVELGDRALENIFSMSPIEDVELAKHRVRKGSFFLQDLDTLPNFTSEGYGSIRRVYVYGEEDRIFSRDFQLWQINNYKPDKVYCVPGADHKIMISRVNELAQILQEVANSASDLLAV

SEQ ID NO: 309 - DNA, 780 bp, synthetic construct
  misc_feature 1..780: note = Description of Artificial Sequence: Synthetic polynucleotide
  source 1..780: mol_type = other DNA
atgagtgcgcattttattctgatccacagtatctgccatggcgcctggctgtggtataaactgatcccgttattacagtctgcaggtcataacgttacggcgattgatcttgtcgctagcgggagtaatcctcaccaactggaagaaattggcacatggcgccagtactcagaaccattgttcaccctgatcgaatcgattccggaaggtaagaaagtcattctggtaggagaagcggggggcggcatcaatattgcactggccgcggagaaatatccggagaaagtgagcgctctcgtctttgtgaacggtcttatgcccgatatcgatcacagtccagcgttcgtggtaaagaaatatagcgaagttttcactgactggaaagattcgatcttcagcaattatacctacggtaacgacacggtcaccgcggttgaattgggagatcgtctgctggagaatatcttctccatgtctccgattgaagatgtagaactggcgaaacatcgtgtccgcaaaggctccttttttctgcaagacttggataccctgccgaactttacgtcggaagggtatggttcaattcgtcgtgtgtatgtttacggcgaagaagaccgcatctttagccgcgattttcagttatggcaaattaataattataagcctgataaagtgtactgtgtaccgggtgctgaccacaagattatgatcagccgcgtcaacgagctgagtcagattctccaagaagttgcaaactctgcgagcgatcttcttgcggtg

SEQ ID NO: 310 - protein, 260 aa, synthetic construct
  REGION 1..260: note = Description of Artificial Sequence: Synthetic polypeptide
MSAHFILIHSICHGAWLWYKLIPLLQSAGHNVTAIDLVASGSNPHQLEEIGTWRQYSEPLFTLIESIPEGKKVILVGEAGGGINIALAAEKYPEKVSALVFVNGLMPDIDHSPAFVVKKYSEVFTDWKDSIFSNYTYGNDTVTAVELGDRLLENIFSMSPIEDVELAKHRVRKGSFFLQDLDTLPNFTSEGYGSIRRVYVYGEEDRIFSRDFQLWQINNYKPDKVYCVPGADHKIMISRVNELSQILQEVANSASDLLAV

SEQ ID NO: 311 - DNA, 780 bp, synthetic construct
  misc_feature 1..780: note = Description of Artificial Sequence: Synthetic polynucleotide
  source 1..780: mol_type = other DNA
atgagtgcgcattttattctgatccacagtatctgccatggcgcctggctgtggtataaactgatcccgttattacagtctgcaggtcataacgttacggcgattgatcttgtcgctagcgggagtaatcctcaccaactggaagaaattggcacatggcgccagtactcagaaccattgttcaccctgatcgaatcgattccggaaggtaagaaagtcattctggtaggagaagcggggggcggcatcaatattgcactggccgcggagaaatatccggagaaagtgagcgctctcgtctttgtgaacggtcttatgcccagtatcgatcacagtccagcgttcgtggtaaagaaatatagcgaagttttcactgactggaaagattcgatcttcagcaattatacctacggtaacgacacggtcaccgcggttgaattgggagatcgtctgctggagaatatcttctccatgtctccgattgaagatgtagaactggcgaaacatcgtgtccgcaaaggctccttttttctgcaagacttggataccctgccgaactttacgtcggaagggtatggttcaattcgtcgtgtgtatgtttacggcgaagaagaccgcatctttagccgcgattttcagttatggcaaattaataattataagcctgataaagtgtactgtgtaccgggtgctgaccacaagattatgatcagccgcgtcaacgagctggcccagattctccaagaagttgcaaactctgcgagcgatcttcttgcggtg

SEQ ID NO: 312 - protein, 260 aa, synthetic construct
  REGION 1..260: note = Description of Artificial Sequence: Synthetic polypeptide
MSAHFILIHSICHGAWLWYKLIPLLQSAGHNVTAIDLVASGSNPHQLEEIGTWRQYSEPLFTLIESIPEGKKVILVGEAGGGINIALAAEKYPEKVSALVFVNGLMPSIDHSPAFVVKKYSEVFTDWKDSIFSNYTYGNDTVTAVELGDRLLENIFSMSPIEDVELAKHRVRKGSFFLQDLDTLPNFTSEGYGSIRRVYVYGEEDRIFSRDFQLWQINNYKPDKVYCVPGADHKIMISRVNELAQILQEVANSASDLLAV

SEQ ID NO: 313 - DNA, 780 bp, synthetic construct
  misc_feature 1..780: note = Description of Artificial Sequence: Synthetic polynucleotide
  source 1..780: mol_type = other DNA
atgagtgcgcatttcattctgatccacagtatctgccatggcgcctggctgtggtataaactgatcccgttattacagtctgcaggtcataccgttacggcgattgatcttgtcgcttgtgggagtaatcctcaccaactggaagaaattggcacatggcgccagtactcagaaccattgttcaccctgatcgaatcgattccggaaggtaagaaagtcattctggtaggagaagcggggggcggcatcaatattgcactggccgcggagaaatatccggagaaagtgagcgctctcgtctttgtgaacggtcttatgcccgatatctcgcacagtccagcgttcgtggtaaagaaatatagcgaagttttcactgactggaaagattcgattttcagcaattatacctacggtaacgacacggtcaccgcggttgaattgggagatcgtaccctggagaatatcttctccatgtctccgattgaagatgtagaactggcgaaacatcgtgtccgcaaaggctccttttttctgcaagacttggatacgctgccgaactttacgtcggaagggtatggttcaattcgtcgtgtgtacatttacggcgaagaagaccaaatctttagccgcgattttcagttatggcaaattaataattataagcctgataaagtgtactgtgtaccgggtggcgaccacaagccgatgatcagccgcgtcaacgagctggcgcagattctccaggaagttgcaaactctgcgagcgatcttcttgcggtg

SEQ ID NO: 314 - protein, 260 aa, synthetic construct
  REGION 1..260: note = Description of Artificial Sequence: Synthetic polypeptide
MSAHFILIHSICHGAWLWYKLIPLLQSAGHTVTAIDLVACGSNPHQLEEIGTWRQYSEPLFTLIESIPEGKKVILVGEAGGGINIALAAEKYPEKVSALVFVNGLMPDISHSPAFVVKKYSEVFTDWKDSIFSNYTYGNDTVTAVELGDRTLENIFSMSPIEDVELAKHRVRKGSFFLQDLDTLPNFTSEGYGSIRRVYIYGEEDQIFSRDFQLWQINNYKPDKVYCVPGGDHKPMISRVNELAQILQEVANSASDLLAV

SEQ ID NO: 315 - DNA, 780 bp, synthetic construct
  misc_feature 1..780: note = Description of Artificial Sequence: Synthetic polynucleotide
  source 1..780: mol_type = other DNA
atgagtgcgcatttcattctgatccacagtatctgccatggcgcctggctgtggtataaactgatcccgttattacagtctgcaggtcataccgttacggcgattgatcttgtcgctagcgggagtaatcctcaccaactggaagaaattggcacatggcgccagtactcagaaccattgttcaccctgatcgaatcgattccggaaggtaagaaagtcattctggtaggagaagcggggggcggcatcaatattgcactggccgcggagaaatatccggagaaagtgagcggtctcgtctttgtgaacggtcttatgcccgatatctcgcacagtccagcgttcgtggtaaagaaatatagcgaagttttcactgactggaaagattcgattttcagcaattatacctacggtaacgacacggtcaccgcggttgaattgggagatcgtaccctggagaatatcttctccatgtctccgattgaagatgtagaactggcgaaacatcgtgtccgcaaaggctccttttttctgcaagacttggatacgctgccgaactttacgtcggaagggtatggttcaattcgtcgtgtgtatgtttacggcgaagaagaccaagtctttagccgcgattttcagttatggcaaattaataattataagcctgataaagtgtactgtgtaccgggtgctgaccacaagattatgatcagccgcgtcaacgagctggcgcagattctccaggaagttgcaaactctgcgagcgatcttcttgcggtg

SEQ ID NO: 316 - protein, 260 aa, synthetic construct
  REGION 1..260: note = Description of Artificial Sequence: Synthetic polypeptide
MSAHFILIHSICHGAWLWYKLIPLLQSAGHTVTAIDLVASGSNPHQLEEIGTWRQYSEPLFTLIESIPEGKKVILVGEAGGGINIALAAEKYPEKVSGLVFVNGLMPDISHSPAFVVKKYSEVFTDWKDSIFSNYTYGNDTVTAVELGDRTLENIFSMSPIEDVELAKHRVRKGSFFLQDLDTLPNFTSEGYGSIRRVYVYGEEDQVFSRDFQLWQINNYKPDKVYCVPGADHKIMISRVNELAQILQEVANSASDLLAV

SEQ ID NO: 317 - DNA, 780 bp, synthetic construct
  misc_feature 1..780: note = Description of Artificial Sequence: Synthetic polynucleotide
  source 1..780: mol_type = other DNA
atgagtgcgcatttcattctgatccacagtatctgccatggcgcctggctgtggtataaactgatcccgttattacagtctgcaggtcataccgttacggcgattgatcttgtcgctagtgggagtaatcctcaccaactggaagaaattggcacatggcgccagtactcagaaccattgttcaccctgatcgaatcgattccggaaggtaagaaagtcattctggtaggagaagcggggggcggcatcaatattgcactggccgcggagaaatatccggagaaagtgagcgctctcgtctttgtgaacggtcttatgcccgatatctcgcacagtccagcgttcgtggtaaagaaatatagcgaagttttcactgactggaaagattcgattttcagcaattatacctacggtaacgacacggtcaccgcggttgaattgggagatcgtaccctggagaatatcttctccatgtctccgattgaagatgtagaactggcgaaacatcgtgtccgcaaaggctccttttttctgcaagacttggatacgctgccgaactttacgtcggaagggtatggttcaattcgtcgtgtgtatgtttacggcgaagaagaccaagtctttagccgcgattttcagttatggcaaattaataattataagcctgataaagtgtactgtgtaccgggtgctgaccacaagattatgatcagccgcgtcaacgagctggcgcagattctccaggaagttgcaaactctgcgagcgatcttcttgcggtg

SEQ ID NO: 318 - protein, 260 aa, synthetic construct
  REGION 1..260: note = Description of Artificial Sequence: Synthetic polypeptide
MSAHFILIHSICHGAWLWYKLIPLLQSAGHTVTAIDLVASGSNPHQLEEIGTWRQYSEPLFTLIESIPEGKKVILVGEAGGGINIALAAEKYPEKVSALVFVNGLMPDISHSPAFVVKKYSEVFTDWKDSIFSNYTYGNDTVTAVELGDRTLENIFSMSPIEDVELAKHRVRKGSFFLQDLDTLPNFTSEGYGSIRRVYVYGEEDQVFSRDFQLWQINNYKPDKVYCVPGADHKIMISRVNELAQILQEVANSASDLLAV

SEQ ID NO: 319 - DNA, 780 bp, synthetic construct; identical to SEQ ID NO: 155
  misc_feature 1..780: note = Description of Artificial Sequence: Synthetic polynucleotide
  source 1..780: mol_type = other DNA

SEQ ID NO: 320 - protein, 260 aa, synthetic construct; identical to SEQ ID NO: 156
  REGION 1..260: note = Description of Artificial Sequence: Synthetic polypeptide

SEQ ID NO: 321 - DNA, 780 bp, synthetic construct
  misc_feature 1..780: note = Description of Artificial Sequence: Synthetic polynucleotide
  source 1..780: mol_type = other DNA
atgagtgcgcattttattctgatccacagtatctgccatggcgcctggctgtggtataaactgatcccgttattacagtctgcaggtcataccgttacggcgattgatcttgtcgctagcgggagtaatcctcaccaactggaagaaattggcacatggcgccagtactcagaaccattgttcaccctgatcgaatcgattccggaaggtaagaaagtcattctggtaggagaagcggggggcggcatcaatattgcactggccgcggagaaatatccggagaaagtgagcgctctcgtctttgtgaacggtcttatgcccgatatctcgcacagtccagcgttcgtggtaaagaaatatagcgaagttttcactgactggaaagattcgattttcagcaattatacctacggtaacgacacggtcaccgcggttgaattgggagatcgtagtctggagaatatcttctccatgtctccgattgaagatgtagaactggcgaaacatcgtgtccgcaaaggctccttttttctgcaagacttggatacgctgccgaactttacgtcggaagggtatggttcaattcgtcgtgtgtatgtttacggcgaagaagacagcatttttagccgcgattttcagttatggcaaattaataattataagcctgataaagtgtactgtgtaccgggtgctgaccacaagattatgatcagccgcgtcaacgagctggcccagattctccaggaagttgcaaactctgcgagcgatcttcttgcggtg

SEQ ID NO: 322 - protein, 260 aa, synthetic construct
  REGION 1..260: note = Description of Artificial Sequence: Synthetic polypeptide
MSAHFILIHSICHGAWLWYKLIPLLQSAGHTVTAIDLVASGSNPHQLEEIGTWRQYSEPLFTLIESIPEGKKVILVGEAGGGINIALAAEKYPEKVSALVFVNGLMPDISHSPAFVVKKYSEVFTDWKDSIFSNYTYGNDTVTAVELGDRSLENIFSMSPIEDVELAKHRVRKGSFFLQDLDTLPNFTSEGYGSIRRVYVYGEEDSIFSRDFQLWQINNYKPDKVYCVPGADHKIMISRVNELAQILQEVANSASDLLAV

SEQ ID NO: 323 - DNA, 780 bp, synthetic construct
  misc_feature 1..780: note = Description of Artificial Sequence: Synthetic polynucleotide
  source 1..780: mol_type = other DNA
atgagtgcgcattttattctgatccacagtatctgccatggcgcctggctgtggtataaactgatcccgttattacagtctgcaggtcataccgttacggcgattgatcttgtcgctagcgggagtaatcctcaccaaatggaagaaattggcacatggcgccagtactcagaaccattgttcaccctgatcgaatcgattccggaaggtaagaaagtcattctggtaggagaagcggggggcggcatcaatattgcactggccgcggagaaatatccggagaaagtgagcgctctcgtctttgtgaacggtcttatgcccgatatctcgcacagtccagcgttcgtggtaaagaaatatagcgaagttttcactgactggaaagattcgattttcagcaattatacctacggtaacgacacggtcaccgcggttgaattgggagatcgtaccctggagaatatcttctccatgtctccgattgaagatgtagaactggcgaaacatcgtgtccgcaaaggctccttttttctgcaagacttggatacgctgccgaactttacgtcggaagggtatggttcaattcgtcgtgtgtatgtttacggcgaagaagaccgtgtgtttagccgcgattttcagttatggcaaattaataattataagcctgataaagtgtactgtgtaccgggtgctgaccacaagattatgatcagccgcgtcaacgagctggcccagattctccaggaagttgcaaactctgcgagcgatcttcttgcggtg

SEQ ID NO: 324 - protein, 260 aa, synthetic construct
  REGION 1..260: note = Description of Artificial Sequence: Synthetic polypeptide
MSAHFILIHSICHGAWLWYKLIPLLQSAGHTVTAIDLVASGSNPHQMEEIGTWRQYSEPLFTLIESIPEGKKVILVGEAGGGINIALAAEKYPEKVSALVFVNGLMPDISHSPAFVVKKYSEVFTDWKDSIFSNYTYGNDTVTAVELGDRTLENIFSMSPIEDVELAKHRVRKGSFFLQDLDTLPNFTSEGYGSIRRVYVYGEEDRVFSRDFQLWQINNYKPDKVYCVPGADHKIMISRVNELAQILQEVANSASDLLAV

SEQ ID NO: 325 - DNA, 780 bp, synthetic construct
  misc_feature 1..780: note = Description of Artificial Sequence: Synthetic polynucleotide
  source 1..780: mol_type = other DNA
atgagtgcgcattttattctgatccacagtatctgccatggcgcctggctgtggtataaactgatcccgttattacagtctgcaggtcataccgttacggcgattgatcttgtcgctagcgggagtaatcctcaccaactggaagaaattggcacatggcgccagtactcagaaccattgttcaccctgatcgaatcgattccggaaggtaagaaagtcattctggtaggagaagcggggggcggcatcaatattgcactggccgcggagaaatatccggagaaagtgagcgctctcgtctttgtgaacggtcttatgcccgatatcagtcacagtccagcgttcgtggtaaagaaatatagcgaagttttcactgactggaaagattcgattttcagcaattatacctacggtaacgacacggtcaccgcggttgaattgggagatcgtagtctggagaatatcttctccatgtctccgattgaagatgtagaactggcgaaacatcgtgtccgcaaaggctccttttttctgcaagacttggatacgctgccgaactttacgtcggaagggtatggttcaattcgtcgtgtgtatgtttacggcgaagaagaccagacctttagccgcgattttcagttatggcaaattaataattataagcctgataaagtgtactgtgtaccgggtgctgaccacaagattatgatcagccgcgtcaacgagctggcgcagattctccaggaagtagcaaactctgcgagcgatcttcttgcggtg

SEQ ID NO: 326 - protein, 260 aa, synthetic construct
  REGION 1..260: note = Description of Artificial Sequence: Synthetic polypeptide
MSAHFILIHSICHGAWLWYKLIPLLQSAGHTVTAIDLVASGSNPHQLEEIGTWRQYSEPLFTLIESIPEGKKVILVGEAGGGINIALAAEKYPEKVSALVFVNGLMPDISHSPAFVVKKYSEVFTDWKDSIFSNYTYGNDTVTAVELGDRSLENIFSMSPIEDVELAKHRVRKGSFFLQDLDTLPNFTSEGYGSIRRVYVYGEEDQTFSRDFQLWQINNYKPDKVYCVPGADHKIMISRVNELAQILQEVANSASDLLAV

SEQ ID NO: 327 - DNA, 780 bp, synthetic construct
  misc_feature 1..780: note = Description of Artificial Sequence: Synthetic polynucleotide
  source 1..780: mol_type = other DNA
atgagtgcgcattttattctgatccacagtatctgccatggcgcctggctgtggtataaactgatcccgttattacagtctgcaggtcataccgttacggcgattgatcttgtcgctagcgggagtaatcctcaccaactggaagaaattggcacatggcgccagtactcagaaccattgttcaccctgatcgaatcgattccggaaggtaagaaagtcattctggtaggagaagcggggggcggcatcaatattgcactggccgcggagaaatatccggagaaagtgagcgctctcgtctttgtgaacggtcttatgcccgatatcgatcacagtccagcgttcgtggtaaagaaatatagcgaagttttcactgactggaaagattcgattttcagcaattatacctacggtaacgacacggtcaccgcggttgaattgggagatcgtaccctggagaatatcttctccatgtctccgattgaagatgtagaactggcgaaacatcgtgtccgcaaaggctccttttttctgcaagacttggatacgctgccgaactttacgtcggaagggtatggttcaattcgtcgtgtgtatgtctacggcgaagaagacagcatttttagccgcgattttcagttatggcaaattaataattataagcctgataaagtgtactgtgtaccgggtgctgaccacaagattatgatcagccgcgtcaacgagctggcccagattctccaggaagttgcaaactctgcgagcgatcttcttgcggtg

SEQ ID NO: 328 - protein, 260 aa, synthetic construct
  REGION 1..260: note = Description of Artificial Sequence: Synthetic polypeptide
MSAHFILIHSICHGAWLWYKLIPLLQSAGHTVTAIDLVASGSNPHQLEEIGTWRQYSEPLFTLIESIPEGKKVILVGEAGGGINIALAAEKYPEKVSALVFVNGLMPDIDHSPAFVVKKYSEVFTDWKDSIFSNYTYGNDTVTAVELGDRTLENIFSMSPIEDVELAKHRVRKGSFFLQDLDTLPNFTSEGYGSIRRVYVYGEEDSIFSRDFQLWQINNYKPDKVYCVPGADHKIMISRVNELAQILQEVANSASDLLAV

SEQ ID NO: 329 - DNA, 780 bp, synthetic construct
  misc_feature 1..780: note = Description of Artificial Sequence: Synthetic polynucleotide
  source 1..780: mol_type = other DNA
atgagtgcgcattttattctgatccacagtatctgccatggcgcctggctgtggtataaactgattccgttattacagtctgcgggtcataccgttacggcgattgatcttgtcgctagcgggagtaatcctcaccaactggaagaaattggcacatggcgccagtactcagaaccattgttcaccctgatcgaatcgattccggaaggtaagaaagtcattctggtaggagaagcggggggcggcatcaatattgcactggccgcggagaaatatccggagaaagtgagcgctctcgtctttgtgaacggtcttatgcccgatatctcgcacagtccagcgttcgtggtaaagaaatatagcgaagttttcactgactggaaagattcgattttcagcaattatacctacggtaacgacacggtcaccgcggttgaattgggagatcgtctgctggagaatatcttctccatgtctccgattgaagatgtagaactggcgaaacatcgtgtccgcaaaggctccttttttctgcaagacttggatacgctgccgaactttacgtcggaagggtatggttcaattcgtcgtgtgtatgtttacggcgaagaagacagcatttttagccgcgattttcagttatggcaaattaataattataagcctgataaagtgtactgtgtaccgggtgctgaccacaagattatgatcagccgcgtcaacgagctggcccagattctccaggaagtagcaaactctgcgagcgatcttcttgcggtg

SEQ ID NO: 330 - protein, 260 aa, synthetic construct
  REGION 1..260: note = Description of Artificial Sequence: Synthetic polypeptide
MSAHFILIHSICHGAWLWYKLIPLLQSAGHTVTAIDLVASGSNPHQLEEIGTWRQYSEPLFTLIESIPEGKKVILVGEAGGGINIALAAEKYPEKVSALVFVNGLMPDISHSPAFVVKKYSEVFTDWKDSIFSNYTYGNDTVTAVELGDRLLENIFSMSPIEDVELAKHRVRKGSFFLQDLDTLPNFTSEGYGSIRRVYVYGEEDSIFSRDFQLWQINNYKPDKVYCVPGADHKIMISRVNELAQILQEVANSASDLLAV

SEQ ID NO: 331 - DNA, 780 bp, synthetic construct
  misc_feature 1..780: note = Description of Artificial Sequence: Synthetic polynucleotide
  source 1..780: mol_type = other DNA
atgagtgcgcattttattctgatccacagtatctgccatggcgcttggctgtggtataaactggggccgttattacagtctgcaggtcataccgttacggcgattgatcttgtcgctagcgggagtaatcctcaccaactggaagaaattggcacatggcgccagtactcagaaccattgttcaccctgatcgaatcgattccggaaggtaagaaagtcattctggtaggagaagcggggggcggcatcaatattgcactggccgcggagaaatatccggagaaagtgagcgctctcgtctttgtgaacggtcttatgcccgatatctcgcacagtccagcgttcgtggtaaagaaatatagcgaagttttcactgactggaaagattcgattttcagcaattatacctacggtaacgacacggtcaccgcggttgaattgggagatcgtaccctggagaatatcttctccatgtctccgattgaagatgtagaactggcgaaacatcgtgtccgcaaaggctccttttttctgcaagacttggatacgctgccgaactttacgtcggaagggtatggttcaattcgtcgtgtgtatgtttacggcgaagaagacagcatttttagccgcgattttcagttatggcaaattaataattataagcctgataaagtgtactgtgtaccgggtgctgaccacaagattatgatcagccgcgtcaacgagctggcccagattctccaggaagttgcaaactctgcgagcgatcttcttgcggtg

SEQ ID NO: 332 - protein, 260 aa, synthetic construct
  REGION 1..260: note = Description of Artificial Sequence: Synthetic polypeptide
MSAHFILIHSICHGAWLWYKLGPLLQSAGHTVTAIDLVASGSNPHQLEEIGTWRQYSEPLFTLIESIPEGKKVILVGEAGGGINIALAAEKYPEKVSALVFVNGLMPDISHSPAFVVKKYSEVFTDWKDSIFSNYTYGNDTVTAVELGDRTLENIFSMSPIEDVELAKHRVRKGSFFLQDLDTLPNFTSEGYGSIRRVYVYGEEDSIFSRDFQLWQINNYKPDKVYCVPGADHKIMISRVNELAQILQEVANSASDLLAV

SEQ ID NO: 333 - DNA, 780 bp, synthetic construct
  misc_feature 1..780: note = Description of Artificial Sequence: Synthetic polynucleotide
  source 1..780: mol_type = other DNA
atgagtgcgcattttattctgatccacagtatctgccatggcgcttggctgtggtataaactggggccgttattacagtctgcgggtcataccgttacggcgattgatcttgtcgctagcgggagtaatcctcaccaactggaagaaattggcacatggcgccagtactcagaaccattgttcaccctgatcgaatcgattccggaaggtaagaaagtcattctggtaggagaagcggggggcggcatcaatattgcactggccgcggagaaatatccggagaaagtgagcgctctcgtctttgtgaacggtcttatgcccgatatctcgcacagtccagcgttcgtggtaaagaaatatagcgaagttttcactgactggaaagattcgattttcagcaattatacctacggtaacgacacggtcaccgcggttgaattgggagatcgtaccctggagaatatcttctccatgtctccgattgaagatgtagaactggcgaaacatcgtgtccgcaaaggctccttttttctgcaagacttggatacgctgccgaactttacgtcggaagggtatggttcaattcgtcgtgtgtatgtctacggcgaagaagaccagtgttttagccgcgattttcagttatggcaaattaataattataagcctgataaagtgtactgtgtaccgggtgctgaccacaagattatgatcagccgcgtcaacgagctgtcgcagattctccaggaagttgcaaactctgcgagcgatcttcttgcggtg

SEQ ID NO: 334 - protein, 260 aa, synthetic construct
  REGION 1..260: note = Description of Artificial Sequence: Synthetic polypeptide
MSAHFILIHSICHGAWLWYKLGPLLQSAGHTVTAIDLVASGSNPHQLEEIGTWRQYSEPLFTLIESIPEGKKVILVGEAGGGINIALAAEKYPEKVSALVFVNGLMPDISHSPAFVVKKYSEVFTDWKDSIFSNYTYGNDTVTAVELGDRTLENIFSMSPIEDVELAKHRVRKGSFFLQDLDTLPNFTSEGYGSIRRVYVYGEEDQCFSRDFQLWQINNYKPDKVYCVPGADHKIMISRVNELSQILQEVANSASDLLAV

SEQ ID NO: 335 - DNA, 780 bp, synthetic construct
  misc_feature 1..780: note = Description of Artificial Sequence: Synthetic polynucleotide
  source 1..780: mol_type = other DNA
atgagtgcgcattttattctgatccacagtatctgccatggcgcctggctgtggtataaactggggccgttattacagtctgcaggtcataccgttacggcgattgatcttgtcgctagcgggagtaatcctcaccaactggaagaaattggcacatggcgccagtactcagaaccattgttcaccctgatcgaatcgattccggaaggtaagaaagtcattctggtaggagaagcggggggcggcatcaatattgcactggccgcggagaaatatccggagaaagtgagcgctctcgtctttgtgaacggtcttatgcccgatatctcgcacagtccagcgttcgtggtaaagaaatatagcgaagttttcactgactggaaagattcgattttcagcaattatacctacggtaacgacacggtcaccgcggttgaattgggagatcgtaccctggagaatatcttctccatgtctccgattgaagatgtagaactggcgaaacatcgtgtccgcaaaggctccttttttctgcaagacttggatacgctgccgaactttacgtcggaagggtatggttcaattcgtcgtgtgtatgtttacggcgaagaagaccagtgttttagccgcgattttcagttatggcaaattaataattataagcctgataaagtgtactgtgtaccgggtgctgaccacaagattatgatcagccgcgtcaacgagctggcgcagattctccaggaagttgcaaactctgcgagcgatcttcttgcggtg

SEQ ID NO: 336 - protein, 260 aa, synthetic construct
  REGION 1..260: note = Description of Artificial Sequence: Synthetic polypeptide
MSAHFILIHSICHGAWLWYKLGPLLQSAGHTVTAIDLVASGSNPHQLEEIGTWRQYSEPLFTLIESIPEGKKVILVGEAGGGINIALAAEKYPEKVSALVFVNGLMPDISHSPAFVVKKYSEVFTDWKDSIFSNYTYGNDTVTAVELGDRTLENIFSMSPIEDVELAKHRVRKGSFFLQDLDTLPNFTSEGYGSIRRVYVYGEEDQCFSRDFQLWQINNYKPDKVYCVPGADHKIMISRVNELAQILQEVANSASDLLAV

SEQ ID NO: 337 - DNA, 780 bp, synthetic construct
  misc_feature 1..780: note = Description of Artificial Sequence: Synthetic polynucleotide
  source 1..780: mol_type = other DNA
atgagtgcgcattttattctgatccacagtatctgccatggcgcttggatttggtataaactgattccgttattacagtctgcaggtcataccgttacggcgattgatcttgtcgctagcgggagtaatcctcaccaactggaagaaattggcacatggcgccagtactcagaaccattgttcaccctgatcgaatcgattccggaaggtaagaaagtcattctggtaggagaagcggggggcggcatcaatattgcactggccgcggagaaatatccggagaaagtgagcgctctcgtctttgtgaacggtcttatgcccgatatctcgcacagtccagcgttcgtggtaaagaaatatagcgaagttttcactgactggaaagattcgattttcagcaattatacctacggtaacgacacggtcaccgcggttgaattgggagatcgtaccctggagaatatcttctccatgtctccgattgaagatgtagaactggcgaaacatcgtgtccgcaaaggctccttttttctgcaagacttggatacgctgccgaactttacgtcggaagggtatggttcaattcgtcgtgtgtatgtttacggcgaagaagacagcatttttagccgcgattttcagttatggcaaattaataattataagcctgataaagtgtactgtgtaccgggtgctgaccacaagattatgatcagccgcgtcaacgagctggcgcagattctccaggaagttgcaaactctgcgagcgatcttcttgcggtg

SEQ ID NO: 338 - protein, 260 aa, synthetic construct
  REGION 1..260: note = Description of Artificial Sequence: Synthetic polypeptide
MSAHFILIHSICHGAWIWYKLIPLLQSAGHTVTAIDLVASGSNPHQLEEIGTWRQYSEPLFTLIESIPEGKKVILVGEAGGGINIALAAEKYPEKVSALVFVNGLMPDISHSPAFVVKKYSEVFTDWKDSIFSNYTYGNDTVTAVELGDRTLENIFSMSPIEDVELAKHRVRKGSFFLQDLDTLPNFTSEGYGSIRRVYVYGEEDSIFSRDFQLWQINNYKPDKVYCVPGADHKIMISRVNELAQILQEVANSASDLLAV

SEQ ID NO: 339 - DNA, 780 bp, synthetic construct
  misc_feature 1..780: note = Description of Artificial Sequence: Synthetic polynucleotide
  source 1..780: mol_type = other DNA
atgagtgcgcattttattctgatccacagtatctgccatggcgcctggctgtggtataaactgatcccgttattacagtctgcaggtcataccgttacggcgattgatcttgtcgctagcgggagtaatcctcaccaactggaagaaattggcacatggcgccagtactcagaaccattgttcaccctgatcgaatcgattccggaaggtaagaaagtcattctggtaggagaagcggggggcggcatcaatattgcactggccgcggagaaatatccggagaaagtgagcgctctcgtctttgtgaacggtcttatgcccgatatctcgcacagtccagcgttcgtggtaaagaaatatagcgaagttttcactgactggaaagattcgattttcagcaattatacctacggtaacgacacggtcaccgcggttgaattgggagatcgtaccctggagaatatcttctccatgtctccgattgaagatgtagaactggcgaaacatcgtgtccgcaaaggctccttttttctgcaagacttggatacgctgccgaactttacgtcggaagggtatggttcaattcgtcgtgtgtatgtctacggcgaagaagaccagacctttagccgcgattttcagttatggcaaattaataattataagcctgataaagtgtactgtgtaccgggtgctgaccacaagattatgatcagccgcgtcaacgagctggcccagattctccaggaagttgcaaactctgcgagcgatcttcttgcggtg

SEQ ID NO: 340 - protein, 260 aa, synthetic construct
  REGION 1..260: note = Description of Artificial Sequence: Synthetic polypeptide
MSAHFILIHSICHGAWLWYKLIPLLQSAGHTVTAIDLVASGSNPHQLEEIGTWRQYSEPLFTLIESIPEGKKVILVGEAGGGINIALAAEKYPEKVSALVFVNGLMPDISHSPAFVVKKYSEVFTDWKDSIFSNYTYGNDTVTAVELGDRTLENIFSMSPIEDVELAKHRVRKGSFFLQDLDTLPNFTSEGYGSIRRVYVYGEEDQTFSRDFQLWQINNYKPDKVYCVPGADHKIMISRVNELAQILQEVANSASDLLAV

SEQ ID NO: 341 - DNA, 780 bp, synthetic construct
  misc_feature 1..780: note = Description of Artificial Sequence: Synthetic polynucleotide
  source 1..780: mol_type = other DNA
atgagtgcgcattttattctgatccacagtatctgccatggcgcctggctgtggtataaactgatcccgttattacagtctgcaggtcataccgttacggcgattgatcttgtcgctagcgggagtaatcctcaccaactggaagaaattggcacatggcgccagtactcagaaccattgttcaccctgatcgaatcgattccggaaggtaagaaagtcattctggtaggagaagcggggggcggcatcaatattgcactggccgcggagaaatatccggagaaagtgagcgctctcgtctttgtgaacggtcttatgcccgatatctcgcacagtccagcgttcgtggtaaagaaatatagcgaagttttcactgactggaaagattcgattttcagcaattatacctacggtaacgacacggtcaccgcggttgaattgggagatcgtaccctggagaatatcttctccatgtctccgattgaagatgtagaactggcgaaacatcgtgtccgcaaaggctccttttttctgcaagacttggatacgctgccgaactttacgtcggaagggtatggttcaattcgtcgtgtgtatgtttacggcgaagaagacagtgtgtttagccgcgattttcagttatggcaaattaataattataagcctgataaagtgtactgtgtaccgggtgctgaccacaagattatgatcagccgcgtcaacgagctggcccagattctccaggaagtagcaaactctgcgagcgatcttcttgcggtg

SEQ ID NO: 342 - protein, 260 aa, synthetic construct
  REGION 1..260: note = Description of Artificial Sequence: Synthetic polypeptide
MSAHFILIHSICHGAWLWYKLIPLLQSAGHTVTAIDLVASGSNPHQLEEIGTWRQYSEPLFTLIESIPEGKKVILVGEAGGGINIALAAEKYPEKVSALVFVNGLMPDISHSPAFVVKKYSEVFTDWKDSIFSNYTYGNDTVTAVELGDRTLENIFSMSPIEDVELAKHRVRKGSFFLQDLDTLPNFTSEGYGSIRRVYVYGEEDSVFSRDFQLWQINNYKPDKVYCVPGADHKIMISRVNELAQILQEVANSASDLLAV

SEQ ID NO: 343 - DNA, 780 bp, synthetic construct
  misc_feature 1..780: note = Description of Artificial Sequence: Synthetic polynucleotide
  source 1..780: mol_type = other DNA
atgagtgcgcattttattctgatccacagtatctgccatggcgcctggctgtggtataaactgatcccgttattacagtctgcaggtcataccgttacggcgattgatcttgtcgctagcgggagtaatcctcaccaactggaagaaattggcacatggcgccagtactcagaaccattgttcaccctgatcgaatcgattccggaaggtaagaaagtcattctggtaggagaagcggggggcggcatcaatattgcactggccgcggagaaatatccggagaaagtgagcgctctcgtctttgtgaacggtcttatgcccgatatctcgcacagtccagcgttcgtggtaaagaaatatagcgaagttttcactgactggaaagattcgattttcagcaattatacctacggtaacgacacggtcaccgcggttgaattgggagatcgtaccctggagaatatcttctccatgtctccgattgaagatgtagaactggcgaaacatcgtgtccgcaaaggctccttttttctgcaagacttggatacgatgccgaactttacgtcggaagggtatggttcaattcgtcgtgtgtatgtttacggcgaagaagacagcatttttagccgcgattttcagttatggcaagttaataattataagcctgataaagtgtactgtgtaccgggtgctgaccacaagattatgatcagccgcgtcaacgagctggcccagattctccaggaagttgcaaactctgcgagcgatcttcttgcggtg

SEQ ID NO: 344 - protein, 260 aa, synthetic construct
  REGION 1..260: note = Description of Artificial Sequence: Synthetic polypeptide
MSAHFILIHSICHGAWLWYKLIPLLQSAGHTVTAIDLVASGSNPHQLEEIGTWRQYSEPLFTLIESIPEGKKVILVGEAGGGINIALAAEKYPEKVSALVFVNGLMPDISHSPAFVVKKYSEVFTDWKDSIFSNYTYGNDTVTAVELGDRTLENIFSMSPIEDVELAKHRVRKGSFFLQDLDTMPNFTSEGYGSIRRVYVYGEEDSIFSRDFQLWQVNNYKPDKVYCVPGADHKIMISRVNELAQILQEVANSASDLLAV

SEQ ID NO: 345 - DNA, 780 bp, synthetic construct
  misc_feature 1..780: note = Description of Artificial Sequence: Synthetic polynucleotide
  source 1..780: mol_type = other DNA
atgagtgcgcattttattctgatccacagtatctgccatggcgcctggctgtggtataaactgatcccgttattacagtctgcaggtcataccgttacggcgattgatcttgtcgctagcgggagtaatcctcaccaactggaagaaattggcacatggcgccagtactcagaaccattgttcaccgctatcgaatcgattccggaaggtaagaaagtcattctggtaggagaagcggggggcggcatcaatattgcactggccgcggagaaatatccggagaaagtgagcgctctcgtctttgtgaacggtcttatgcccgatatctcgcacagtccagcgttcgtggtaaagaaatatagcgaagttttcactgactggaaagattcgattttcagcaattatacctacggtaacgacacggtcaccgcggttgaattgggagatcgtaccctggagaatatcttctccatgtctccgattgaagatgtagaactggcgaaacatcgtgtccgcaaaggctccttttttctgcaagacttggatacgctgccgaactttacgtcggaagggtatggttcaattcgtcgtgtgtatgtttacggcgaagaagacagcatttttagccgcgattttcagttatggcaaattaataattataagcctgataaagtgtactgtgtaccgggtgctgaccacaagattatgatcagccgcgtcaacgagctggcccagattctccaggaagttgcaaactctgcgagcgatcttcttgcggtg

SEQ ID NO: 346 - protein, 260 aa, synthetic construct
  REGION 1..260: note = Description of Artificial Sequence: Synthetic polypeptide
MSAHFILIHSICHGAWLWYKLIPLLQSAGHTVTAIDLVASGSNPHQLEEIGTWRQYSEPLFTAIESIPEGKKVILVGEAGGGINIALAAEKYPEKVSALVFVNGLMPDISHSPAFVVKKYSEVFTDWKDSIFSNYTYGNDTVTAVELGDRTLENIFSMSPIEDVELAKHRVRKGSFFLQDLDTLPNFTSEGYGSIRRVYVYGEEDSIFSRDFQLWQINNYKPDKVYCVPGADHKIMISRVNELAQILQEVANSASDLLAV

SEQ ID NO: 347 - DNA, 780 bp, synthetic construct
  misc_feature 1..780: note = Description of Artificial Sequence: Synthetic polynucleotide
  source 1..780: mol_type = other DNA
atgagtgcgcattttattctgatccacagtatctgccatggcgcctggctgtggtataaactgatcccgttattacagggggcaggtcataccgttacggcgattgatcttgtcgctagcgggagtaatcctcaccaactggaagaaattggcacatggcgccagtactcagaaccattgttcaccctgatcgaatcgattccggaaggtaagaaagtcattctggtaggagaagcggggggcggcatcaatattgcactggccgcggagaaatatccggagaaagtgagcgctctcgtctttgtgaacggtcttatgcccgatatctcgcacagtccagcgttcgtggtaaagaaatatagcgaagttttcactgactggaaagattcgattttcagcaattatacctacggtaacgacacggtcaccgcggttgaattgggagatcgtaccctggagaatatcttctccatgtctccgattgaagatgtagaactggcgaaacatcgtgtccgcaaaggctccttttttctgcaagacttggatacgctgccgaactttacgtcggaagggtatggttcaattcgtcgtgtgtatgtttacggcgaagaagacagcatttttagccgcgattttcagttatggcaaattaataattataagcctgataaagtgtactgtgtaccgggtgctgaccacaagattatgatcagccgcgtcaacgagctggcccagattctccaggaagttgcaaactctgcgagcgatcttcttgcggtg

SEQ ID NO: 348 - protein, 260 aa, synthetic construct
  REGION 1..260: note = Description of Artificial Sequence: Synthetic polypeptide
MSAHFILIHSICHGAWLWYKLIPLLQGAGHTVTAIDLVASGSNPHQLEEIGTWRQYSEPLFTLIESIPEGKKVILVGEAGGGINIALAAEKYPEKVSALVFVNGLMPDISHSPAFVVKKYSEVFTDWKDSIFSNYTYGNDTVTAVELGDRTLENIFSMSPIEDVELAKHRVRKGSFFLQDLDTLPNFTSEGYGSIRRVYVYGEEDSIFSRDFQLWQINNYKPDKVYCVPGADHKIMISRVNELAQILQEVANSASDLLAV

SEQ ID NO: 349 - DNA, 780 bp, synthetic construct
  misc_feature 1..780: note = Description of Artificial Sequence: Synthetic polynucleotide
  source 1..780: mol_type = other DNA
atgagtgcgcattttattctgatccacagtatctgccatggcgcctggctgtggtataaactgatcccgttattacagtctgcaggtcataccgttacggcgattgatcttgtcgctagcgggagtaatcctcaccaactggaagaaattggcacatggcgccagtactcagaaccattgttcaccctgatcgaatcgattccggaaggtaagaaagtcattctggtaggagaagcggggggcggcatcaatattgcactggccgcggagaaatatccggagaaagtgagcgctctcgtctttgtgaacggtcttatgcccgatatctcgcacagtccagcgttcgtggtaaagaaatatagcgaagttttcactgactggaaagattcgattttcagcaattatacctacggtaacgacacggtcaccgcggttgaattgggagatcgtaccctggagaatatcttctccatgtctccgattgaagatgtagaactggcgaaacatcgtgtccgcaaaggctccttttttctgcaagacttggatacgctgccgaactttacgtcggaagggtatggttcaattcgtcgtgtgtatgtttgtggcgaagaagacagcatttttagccgcgattttcagttatggcaaattaataattataagcctgataaagtgtactgtgtaccgggtgctgaccacaagattatgatcagccgcgtcaacgagctggcccagattctccaggaagttgcaaactctgcgagcgatcttcttgcggtg

SEQ ID NO: 350 - protein, 260 aa, synthetic construct
  REGION 1..260: note = Description of Artificial Sequence: Synthetic polypeptide
MSAHFILIHSICHGAWLWYKLIPLLQSAGHTVTAIDLVASGSNPHQLEEIGTWRQYSEPLFTLIESIPEGKKVILVGEAGGGINIALAAEKYPEKVSALVFVNGLMPDISHSPAFVVKKYSEVFTDWKDSIFSNYTYGNDTVTAVELGDRTLENIFSMSPIEDVELAKHRVRKGSFFLQDLDTLPNFTSEGYGSIRRVYVCGEEDSIFSRDFQLWQINNYKPDKVYCVPGADHKIMISRVNELAQILQEVANSASDLLAV

SEQ ID NO: 351 - DNA, 780 bp, synthetic construct
  misc_feature 1..780: note = Description of Artificial Sequence: Synthetic polynucleotide
  source 1..780: mol_type = other DNA
atgagtgcgcattttattctgatccacagtatctgccatggcgcctggctgtggtataaactgatcccgttattacagtctgcaggtcataccgttacggcgattgatcttgtcgctagcgggagtaatcctcaccaactggaagaaattggcacatggcgccagtactcagaaccattgttcaccctgatcgaatcgattccggaaggtaagaaagtcattctggtaggagaagcggggggcggcatcaatattgcactggccgcggagaaatatccggagaaagtgagcgctctcgtctttgtgaacggtcttatgcccgatatctcgcacagtccagcgttcgtggtaaagaaatatagcgaagttttcactgacgcgaaagattcgattttcagcaattatacctacggtaacgacacggtcaccgcggttgaattgggagatcgtaccctggagaatatcttctccatgtctccgattgaagatgtagaactggcgaaacatcgtgtccgcaaaggctccttttttctgcaagacttggatacgctgccgaactttacgtcggaagggtatggttcaattcgtcgtgtgtatgtttacggcgaagaagacagcatttttagccgcgattttcagttatggcaaattaataattataagcctgataaagtgtactgtgtaccgggtgctgaccacaagattatgatcagccgcgtcaacgagctggcccagattctccaggaagttgcaaactctgcgagcgatcttcttgcggtg

SEQ ID NO: 352 - protein, 260 aa, synthetic construct
  REGION 1..260: note = Description of Artificial Sequence: Synthetic polypeptide
MSAHFILIHSICHGAWLWYKLIPLLQSAGHTVTAIDLVASGSNPHQLEEIGTWRQYSEPLFTLIESIPEGKKVILVGEAGGGINIALAAEKYPEKVSALVFVNGLMPDISHSPAFVVKKYSEVFTDAKDSIFSNYTYGNDTVTAVELGDRTLENIFSMSPIEDVELAKHRVRKGSFFLQDLDTLPNFTSEGYGSIRRVYVYGEEDSIFSRDFQLWQINNYKPDKVYCVPGADHKIMISRVNELAQILQEVANSASDLLAV

SEQ ID NO: 353 - DNA, 780 bp, synthetic construct
  misc_feature 1..780: note = Description of Artificial Sequence: Synthetic polynucleotide
  source 1..780: mol_type = other DNA
atgagtgcgcattttattctgatccacagtatctgccatggcgcctggctgtggtataaactgatcccgttattacagtctgcaggtcataccgttacggcgattgatcttgtcgctagcgggagtaatcctcaccaactggaagaaattggcacatggcgccagtactcagaaccattgttcaccgagatcgaatcgattccggaaggtaagaaagtcattctggtaggagaagcggggggcggcatcaatattgcactggccgcggagaaatatccggagaaagtgagcgctctcgtctttgtgaacggtcttatgcccgatatctcgcacagtccagcgttcgtggtaaagaaatatagcgaagttttcactgactggaaagattcgattttcagcaattatacctacggtaacgacacggtcaccgcggttgaattgggagatcgtaccctggagaatatcttctccatgtctccgattgaagatgtagaactggcgaaacatcgtgtccgcaaaggctccttttttctgcaagacttggatacgctgccgaactttacgtcggaagggtatggttcaattcgtcgtgtgtatgtttacggcgaagaagacagcatttttagccgcgattttcagttatggcaaattaataattataagcctgataaagtgtactgtgtaccgggtgctgaccacaagattatgatcagccgcgtcaacgagctggcccagattctccaggaagttgcaaactctgcgagcgatcttcttgcggtg

SEQ ID NO: 354 - protein, 260 aa, synthetic construct
  REGION 1..260: note = Description of Artificial Sequence: Synthetic polypeptide
MSAHFILIHSICHGAWLWYKLIPLLQSAGHTVTAIDLVASGSNPHQLEEIGTWRQYSEPLFTEIESIPEGKKVILVGEAGGGINIALAAEKYPEKVSALVFVNGLMPDISHSPAFVVKKYSEVFTDWKDSIFSNYTYGNDTVTAVELGDRTLENIFSMSPIEDVELAKHRVRKGSFFLQDLDTLPNFTSEGYGSIRRVYVYGEEDSIFSRDFQLWQINNYKPDKVYCVPGADHKIMISRVNELAQILQEVANSASDLLAV

SEQ ID NO: 355 - DNA, 780 bp, synthetic construct
  misc_feature 1..780: note = Description of Artificial Sequence: Synthetic polynucleotide
  source 1..780: mol_type = other DNA
atgagtgcgcattttattctgatccacagtatctgccatggcgcctggctgtggtataaactgatcccgttattacagtctgcaggtcataccgttacggcgattgatcttgtcgctagcgggagtaatcctcaccaactggaagaaattggcacatggcgccagtactcagaaccattgttcaccctgatcgaatcgattccggaaggtaagaaagtcattctggtaggagaagcggggggcggcatcaatattgcactggccgcggagaaatatccggagaaagtgagcgctctcgtctttgtgaacggtcttatgcccgatatctcgcacagtccagcgttcgtggtaaagaaatatagcgaagttttcactgactggaaagattcgattttcagcaattatacctacggtaacgacacggtcaccgcggttgaattgggagatcgtaccctggagaatatcttctccatgtctccgattgaagatgtagaactggcgaaacatcgtgtccgcaaaggctccttttttctgcaagacttggatacgctgccgaaccttacgtcggaagggtatggttcaattcgtcgtgtgtatgtttacggcgaagaagacagcatttttagccgcgattttcagttatggcaaattaataattataagcctgataaagtgtactgtgtaccgggtgctgaccacaagattatgatcagccgcgtcaacgagctggcccagattctccaggaagttgcaaactctgcgagcgatcttcttgcggtg

SEQ ID NO: 356 - protein, 260 aa, synthetic construct
  REGION 1..260: note = Description of Artificial Sequence: Synthetic polypeptide
MSAHFILIHSICHGAWLWYKLIPLLQSAGHTVTAIDLVASGSNPHQLEEIGTWRQYSEPLFTLIESIPEGKKVILVGEAGGGINIALAAEKYPEKVSALVFVNGLMPDISHSPAFVVKKYSEVFTDWKDSIFSNYTYGNDTVTAVELGDRTLENIFSMSPIEDVELAKHRVRKGSFFLQDLDTLPNLTSEGYGSIRRVYVYGEEDSIFSRDFQLWQINNYKPDKVYCVPGADHKIMISRVNELAQILQEVANSASDLLAV

SEQ ID NO: 357 - DNA, 780 bp, synthetic construct
  misc_feature 1..780: note = Description of Artificial Sequence: Synthetic polynucleotide
  source 1..780: mol_type = other DNA
atgagtgcgcattttattctgatccacagtatctgccatggcgcctggctgtggtataaactgatcccgttattacagtctgcaggtcataccgttacggcgattgatcttgtcgctagcgggagtaatcctcaccaactggaagaaattggcacatggcgccagtactcagaaccattgttcaccctgatcgaatcgattccggaaggtaagaaagtcattctggtaggagaagcggggggcggcatcaatattgcactggccgcggagaaatatccggagaaagtgagcgctctcgtctttgtgaacggtcttatgcccgatatctcgcacagtccagcgttcgtggtaaagaaatatagcgaagttttcactgactggaaagattcgattttcagcaattatacctacggtaacgacacggtcaccgcggttgaattgggagatcgtaccctggagaatatcttctccatgtctccgattgaagatgtagaactggcgaaacatcgtgtccgcaaaggctccttttttctgcaagacttggatacgctgccgaactttacgtcggaagggtatggttcaattcgtcgtgtgtatgtttacggcgaagaagacagcatttttagccgcgattttcagttatggcaaattaataattataagcctgataaagtgtactgtgtaccgggtgctgaccacaagattatgatcagccgcgtcaacgagctggcccagattctccaggaagttgcaaactctggtagcgatcttcttgcggtg

SEQ ID NO: 358 - protein, 260 aa, synthetic construct
  REGION 1..260: note = Description of Artificial Sequence: Synthetic polypeptide
MSAHFILIHSICHGAWLWYKLIPLLQSAGHTVTAIDLVASGSNPHQLEEIGTWRQYSEPLFTLIESIPEGKKVILVGEAGGGINIALAAEKYPEKVSALVFVNGLMPDISHSPAFVVKKYSEVFTDWKDSIFSNYTYGNDTVTAVELGDRTLENIFSMSPIEDVELAKHRVRKGSFFLQDLDTLPNFTSEGYGSIRRVYVYGEEDSIFSRDFQLWQINNYKPDKVYCVPGADHKIMISRVNELAQILQEVANSGSDLLAV

SEQ ID NO: 359 - DNA, 780 bp, synthetic construct
  misc_feature 1..780: note = Description of Artificial Sequence: Synthetic polynucleotide
  source 1..780: mol_type = other DNA
atgagtgcgcattttattctgatccacagtatctgccatggcgcctggctgtggtataaactgatcccgttattacagtctgcaggtcataccgttacggcgattgatctttatgctagcgggagtaatcctcaccaactggaagaaattggcacatggcgccagtactcagaaccattgttcaccctgatcgaatcgattccggaaggtaagaaagtcattctggtaggagaagcggggggcggcatcaatattgcactggccgcggagaaatatccggagaaagtgagcgctctcgtctttgtgaacggtcttatgcccgatatctcgcacagtccagcgttcgtggtaaagaaatatagcgaagttttcactgactggaaagattcgattttcagcaattatacctacggtaacgacacggtcaccgcggttgaattgggagatcgtaccctggagaatatcttctccatgtctccgattgaagatgtagaactggcgaaacatcgtgtccgcaaaggctccttttttctgcaagacttggatacgctgccgaactttacgtcggaagggtatggttcaattcgtcgtgtgtatgtttacggcgaagaagacagcatttttagccgcgattttcagttatggcaaattaataattataagcctgataaagtgtactgtgtaccgggtgctgaccacaagattatgatcagccgcgtcaacgagctggcccagattctccaggaagttgcaaactctgcgagcgatcttcttgcggtg

SEQ ID NO: 360 - protein, 260 aa, synthetic construct
  REGION 1..260: note = Description of Artificial Sequence: Synthetic polypeptide
MSAHFILIHSICHGAWLWYKLIPLLQSAGHTVTAIDLYASGSNPHQLEEIGTWRQYSEPLFTLIESIPEGKKVILVGEAGGGINIALAAEKYPEKVSALVFVNGLMPDISHSPAFVVKKYSEVFTDWKDSIFSNYTYGNDTVTAVELGDRTLENIFSMSPIEDVELAKHRVRKGSFFLQDLDTLPNFTSEGYGSIRRVYVYGEEDSIFSRDFQLWQINNYKPDKVYCVPGADHKIMISRVNELAQILQEVANSASDLLAV

SEQ ID NO: 361 - DNA, 780 bp, synthetic construct
  misc_feature 1..780: note = Description of Artificial Sequence: Synthetic polynucleotide
  source 1..780: mol_type = other DNA
atgagtgcgcattttattctgatccacagtatctgccatggcgcctggctgtggtataaactgatcccgttattacagtcttggggtcataccgttacggcgattgatcttgtcgctagcgggagtaatcctcaccaactggaagaaattggcacatggcgccagtactcagaaccattgttcaccctgatcgaatcgattccggaaggtaagaaagtcattctggtaggagaagcggggggcggcatcaatattgcactggccgcggagaaatatccggagaaagtgagcgctctcgtctttgtgaacggtcttatgcccgatatctcgcacagtccagcgttcgtggtaaagaaatatagcgaagttttcactgactggaaagattcgattttcagcaattatacctacggtaacgacacggtcaccgcggttgaattgggagatcgtaccctggagaatatcttctccatgtctccgattgaagatgtagaactggcgaaacatcgtgtccgcaaaggctccttttttctgcaagacttggatacgctgccgaactttacgtcggaagggtatggttcaattcgtcgtgtgtatgtttacggcgaagaagacagcatttttagccgcgattttcagttatggcaaattaataattataagcctgataaagtgtactgtgtaccgggtgctgaccacaagattatgatcagccgcgtcaacgagctggcccagattctccaggaagttgcaaactctgcgagcgatcttcttgcggtg

SEQ ID NO: 362 - protein, 260 aa, synthetic construct
  REGION 1..260: note = Description of Artificial Sequence: Synthetic polypeptide
MSAHFILIHSICHGAWLWYKLIPLLQSWGHTVTAIDLVASGSNPHQLEEIGTWRQYSEPLFTLIESIPEGKKVILVGEAGGGINIALAAEKYPEKVSALVFVNGLMPDISHSPAFVVKKYSEVFTDWKDSIFSNYTYGNDTVTAVELGDRTLENIFSMSPIEDVELAKHRVRKGSFFLQDLDTLPNFTSEGYGSIRRVYVYGEEDSIFSRDFQLWQINNYKPDKVYCVPGADHKIMISRVNELAQILQEVANSASDLLAV

SEQ ID NO: 363 - DNA, 780 bp, synthetic construct
  misc_feature 1..780: note = Description of Artificial Sequence: Synthetic polynucleotide
  source 1..780: mol_type = other DNA
atgagtgcgcattttattctgatccacagtatctgccatggcgcctggctgtggtataaactgatcccgttattacagtctgcaggtcataccgttacggcgattgatcttgtcgctagcgggagtaatcctcaccaactggaagaaattggcacatggcgccagtactcagaaccattgttcaccctgatcgaatcgattccggaaggtaagaaagtcattctggtaggagaagcggggggcggcatcaatattgcactggccgcggagaaatatccggagaaagtgagcgctctcgtctttgtgaacggtcttatgcccgatatctcgcacagtccagcgttcgtggtaaagaaatatagcgaagttacgactgactggaaagattcgattttcagcaattatacctacggtaacgacacggtcaccgcggttgaattgggagatcgtaccctggagaatatcttctccatgtctccgattgaagatgtagaactggcgaaacatcgtgtccgcaaaggctccttttttctgcaagacttggatacgctgccgaactttacgtcggaagggtatggttcaattcgtcgtgtgtatgtttacggcgaagaagacagcatttttagccgcgattttcagttatggcaaattaataattataagcctgataaagtgtactgtgtaccgggtgctgaccacaagattatgatcagccgcgtcaacgagctggcccagattctccaggaagttgcaaactctgcgagcgatcttcttgcggtg

SEQ ID NO: 364 - protein, 260 aa, synthetic construct
  REGION 1..260: note = Description of Artificial Sequence: Synthetic polypeptide
MSAHFILIHSICHGAWLWYKLIPLLQSAGHTVTAIDLVASGSNPHQLEEIGTWRQYSEPLFTLIESIPEGKKVILVGEAGGGINIALAAEKYPEKVSALVFVNGLMPDISHSPAFVVKKYSEVTTDWKDSIFSNYTYGNDTVTAVELGDRTLENIFSMSPIEDVELAKHRVRKGSFFLQDLDTLPNFTSEGYGSIRRVYVYGEEDSIFSRDFQLWQINNYKPDKVYCVPGADHKIMISRVNELAQILQEVANSASDLLAV

SEQ ID NO: 365 - DNA, 780 bp, synthetic construct
  misc_feature 1..780: note = Description of Artificial Sequence: Synthetic polynucleotide
  source 1..780: mol_type = other DNA
atgagtgcgcattttattctgatccacagtatctgccatggcgcctggctgtggtataaactgatcccgttattacagtctgcaggtcataccgttacggcgattgatcttgtcgctagcgggagtaatcctcaccaactggaagaaattggcacatggcgccagtactcagaaccattgttcaccctgatcgaatcgattccggaaggtaagaaagtcattctggtaggagaagcggggggcggcatcaatattgcactggccgcggagaaatatccggagaaagtgagcgctctcgtctttgtgaacggtcttatgcccgatatctcgcacagtccagcgttcgtggtaaagaaatatagcgaagttttcactgactggaaagattcgattttcagcaattatacctacggtaacgacacggtcaccgcggttgaattgggagatcgtaccctggagaatatcttctccatgtctccgattgaagatgtagaactggcgaaacatcgtgtccgcaaaggctccttttttctgcaagacttggatacgctgccgaactttacgtcggaagggtatggttcaattcgtcgtgtgtatgtttacggcgaagaagacagcatttttagccgcgattttcagttatggcaaattaataattataagcctgataaagtgctgtgtgtaccgggtgctgaccacaagattatgatcagccgcgtcaacgagctggcccagattctccaggaagttgcaaactctgcgagcgatcttcttgcggtg

SEQ ID NO: 366 - protein, 260 aa, synthetic construct
  REGION 1..260: note = Description of Artificial Sequence: Synthetic polypeptide
MSAHFILIHSICHGAWLWYKLIPLLQSAGHTVTAIDLVASGSNPHQLEEIGTWRQYSEPLFTLIESIPEGKKVILVGEAGGGINIALAAEKYPEKVSALVFVNGLMPDISHSPAFVVKKYSEVFTDWKDSIFSNYTYGNDTVTAVELGDRTLENIFSMSPIEDVELAKHRVRKGSFFLQDLDTLPNFTSEGYGSIRRVYVYGEEDSIFSRDFQLWQINNYKPDKVLCVPGADHKIMISRVNELAQILQEVANSASDLLAV

SEQ ID NO: 367 - DNA, 780 bp, synthetic construct
  misc_feature 1..780: note = Description of Artificial Sequence: Synthetic polynucleotide
  source 1..780: mol_type = other DNA
atgagtgcgcattttattctgatccacagtatctgccatggcgcctggctgtggtataaactgatcccgttattacagtctgcaggtcataccgttacggcgattgatcttgtcgctagcgggagtaatcctcaccaactggaagaaattggcacatggcgccagtactcagaaccattgttcaccctgatcgaatcgattccggaaggtaagaaagtcattctggtaggagaagcggggggcggcatcaatattgcactggccgcggagaaatatccggagaaagtgagcgctctcgtctttgtgaacggtcttatgcccgatatctcgcacagtccagcgttcgtggtaaagaaatatagcgaagttttcactgacagtaaagattcgattttcagcaattatacctacggtaacgacacggtcaccgcggttgaattgggagatcgtaccctggagaatatcttctccatgtctccgattgaagatgtagaactggcgaaacatcgtgtccgcaaaggctccttttttctgcaagacttggatacgctgccgaactttacgtcggaagggtatggttcaattcgtcgtgtgtatgtttacggcgaagaagacagcatttttagccgcgattttcagttatggcaaattaataattataagcctgataaagtgtactgtgtaccgggtgctgaccacaagattatgatcagccgcgtcaacgagctggcccagattctccaggaagttgcaaactctgcgagcgatcttcttgcggtg

SEQ ID NO: 368 - protein, 260 aa, synthetic construct
  REGION 1..260: note = Description of Artificial Sequence: Synthetic polypeptide
MSAHFILIHSICHGAWLWYKLIPLLQSAGHTVTAIDLVASGSNPHQLEEIGTWRQYSEPLFTLIESIPEGKKVILVGEAGGGINIALAAEKYPEKVSALVFVNGLMPDISHSPAFVVKKYSEVFTDSKDSIFSNYTYGNDTVTAVELGDRTLENIFSMSPIEDVELAKHRVRKGSFFLQDLDTLPNFTSEGYGSIRRVYVYGEEDSIFSRDFQLWQINNYKPDKVYCVPGADHKIMISRVNELAQILQEVANSASDLLAV

SEQ ID NO: 369 - DNA, 780 bp, synthetic construct
  misc_feature 1..780: note = Description of Artificial Sequence: Synthetic polynucleotide
  source 1..780: mol_type = other DNA
atgagtgcgcattttattctgatccacagtatctgccatggcgcctggctgtggtataaactgatcccgttattacagtctgcaggtcataccgttacggcgattgatcttgtcgctagcgggagtaatcctcaccaactggaagaaattggcacatggcgccagtactcagaaccattgttcaccctgatcgaatcgattccggaaggtaagaaagtcattctggtaggagaagcggggggcggcatcaatattgcactggccgcggagaaatatccggagaaagtgagcgctctcgtctttgtgaacggtcttatgcccgatatctcgcacgggccagcgttcgtggtaaagaaatatagcgaagttttcactgactggaaagattcgattttcagcaattatacctacggtaacgacacggtcaccgcggttgaattgggagatcgtaccctggagaatatcttctccatgtctccgattgaagatgtagaactggcgaaacatcgtgtccgcaaaggctccttttttctgcaagacttggatacgctgccgaactttacgtcggaagggtatggttcaattcgtcgtgtgtatgtttacggcgaagaagacagcatttttagccgcgattttcagttatggcaaattaataattataagcctgataaagtgtactgtgtaccgggtgctgaccacaagattatgatcagccgcgtcaacgagctggcccagattctccaggaagttgcaaactctgcgagcgatcttcttgcggtg

SEQ ID NO: 370 - protein, 260 aa, synthetic construct
  REGION 1..260: note = Description of Artificial Sequence: Synthetic polypeptide
MSAHFILIHSICHGAWLWYKLIPLLQSAGHTVTAIDLVASGSNPHQLEEIGTWRQYSEPLFTLIESIPEGKKVILVGEAGGGINIALAAEKYPEKVSALVFVNGLMPDISHGPAFVVKKYSEVFTDWKDSIFSNYTYGNDTVTAVELGDRTLENIFSMSPIEDVELAKHRVRKGSFFLQDLDTLPNFTSEGYGSIRRVYVYGEEDSIFSRDFQLWQINNYKPDKVYCVPGADHKIMISRVNELAQILQEVANSASDLLAV

SEQ ID NO: 371 - DNA, 780 bp, synthetic construct
  misc_feature 1..780: note = Description of Artificial Sequence: Synthetic polynucleotide
  source 1..780: mol_type = other DNA
atgagtgcgcattttattctgatccacagtatctgccatggcgcctggctgtggtataaactgatcccgttattacagtctgcaggtcataccgttacggcgattgatcttgtcgctagcgggagtaatcctcaccaactggaagaaattggcacatggcgccagtactcagaaccattgttcaccctgatcgaatcgattccggaaggtaagaaagtcattctggtaggagaagcggggggcggcatcaatattgcactggccgcggagaaatatccggagaaagtgagcgctctcgtctttgtgaacggtcttatgcccgatatctcgcacagtccagcgttcgtggtaaagaaatatagcgaagttttcactgactggaaagattcgattttcagcaattatacctacggtaacgacacggtcaccgcggttgaattgggagatcgtaccctggagaatatcttctccatgtctccgattgaagatgtagaactggcgaaacatcgtgtccgcaaaggctccttttttctgcaagacttggatacgctgccgaactttacgtcggaagggtatggttcatcgcgtcgtgtgtatgtttacggcgaagaagacagcatttttagccgcgattttcagttatggcaaattaataattataagcctgataaagtgtactgtgtaccgggtgctgaccacaagattatgatcagccgcgtcaacgagctggcccagattctccaggaagttgcaaactctgcgagcgatcttcttgcggtg

SEQ ID NO: 372 - protein, 260 aa, synthetic construct
  REGION 1..260: note = Description of Artificial Sequence: Synthetic polypeptide
MSAHFILIHSICHGAWLWYKLIPLLQSAGHTVTAIDLVASGSNPHQLEEIGTWRQYSEPLFTLIESIPEGKKVILVGEAGGGINIALAAEKYPEKVSALVFVNGLMPDISHSPAFVVKKYSEVFTDWKDSIFSNYTYGNDTVTAVELGDRTLENIFSMSPIEDVELAKHRVRKGSFFLQDLDTLPNFTSEGYGSSRRVYVYGEEDSIFSRDFQLWQINNYKPDKVYCVPGADHKIMISRVNELAQILQEVANSASDLLAV

SEQ ID NO: 373 - DNA, 780 bp, synthetic construct
  misc_feature 1..780: note = Description of Artificial Sequence: Synthetic polynucleotide
  source 1..780: mol_type = other DNA
atgagtgcgcattttattctgatccacagtatctgccatggcgcctggctgtggtataaactgatcccgttattacagtctgcaggtcataccgttacggcgattgatctttgtgctagcgggagtaatcctcaccaactggaagaaattggcacatggcgccagtactcagaaccattgttcaccctgatcgaatcgattccggaaggtaagaaagtcattctggtaggagaagcggggggcggcatcaatattgcactggccgcggagaaatatccggagaaagtgagcgctctcgtctttgtgaacggtcttatgcccgatatctcgcacagtccagcgttcgtggtaaagaaatatagcgaagttttcactgactggaaagattcgattttcagcaattatacctacggtaacgacacggtcaccgcggttgaattgggagatcgtaccctggagaatatcttctccatgtctccgattgaagatgtagaactggcgaaacatcgtgtccgcaaaggctccttttttctgcaagacttggatacgctgccgaactttacgtcggaagggtatggttcaattcgtcgtgtgtatgtttacggcgaagaagacagcatttttagccgcgattttcagttatggcaaattaataattataagcctgataaagtgtactgtgtaccgggtgctgaccacaagattatgatcagccgcgtcaacgagctggcccagattctccaggaagttgcaaactctgcgagcgatcttcttgcggtg

SEQ ID NO: 374 - protein, 260 aa, synthetic construct
  REGION 1..260: note = Description of Artificial Sequence: Synthetic polypeptide
MSAHFILIHSICHGAWLWYKLIPLLQSAGHTVTAIDLCASGSNPHQLEEIGTWRQYSEPLFTLIESIPEGKKVILVGEAGGGINIALAAEKYPEKVSALVFVNGLMPDISHSPAFVVKKYSEVFTDWKDSIFSNYTYGNDTVTAVELGDRTLENIFSMSPIEDVELAKHRVRKGSFFLQDLDTLPNFTSEGYGSIRRVYVYGEEDSIFSRDFQLWQINNYKPDKVYCVPGADHKIMISRVNELAQILQEVANSASDLLAV

SEQ ID NO: 375 - DNA, 780 bp, synthetic construct
  misc_feature 1..780: note = Description of Artificial Sequence: Synthetic polynucleotide
  source 1..780: mol_type = other DNA
atgagtgcgcattttattctgatccacagtatctgccatggcgcctggctgtggtataaactgatcccgttattacagtctgcaggtcataccgttacggcgattgatcttgtcgctagcgggagtaatcctcaccaactggaagaaattggcacatggcgccagtactcagaaccattgttcaccctgatcgaatcgattccggaaggtaagaaagtcattctggtaggagaagcggggggcggcatcaatattgcactggccgcggagaaatatccggagaaagtgagcgctctcgtctttgtgaacggtcttatgcccgatatctcgcacagtccagcgttcgtggtaaagaaatatagcgaagttttcactgactggaaagattcgattttcagcaattatacctacggtaacgacacggtcaccgcggttgaattgggagatcgtaccctggagaatatcttctccatgtctccgattgaagatgtagaactggcgaaacatcgtgtccgcaaaggctccttttttctgcaagacttggatacgctgccgaactttacgtcggaagggtatggttcaattcgtcgtgtgtatgttttgggcgaagaagacagcatttttagccgcgattttcagttatggcaaattaataattataagcctgataaagtgtactgtgtaccgggtgctgaccacaagattatgatcagccgcgtcaacgagctggcccagattctccaggaagttgcaaactctgcgagcgatcttcttgcggtg

SEQ ID NO: 376 - protein, 260 aa, synthetic construct
  REGION 1..260: note = Description of Artificial Sequence: Synthetic polypeptide
MSAHFILIHSICHGAWLWYKLIPLLQSAGHTVTAIDLVASGSNPHQLEEIGTWRQYSEPLFTLIESIPEGKKVILVGEAGGGINIALAAEKYPEKVSALVFVNGLMPDISHSPAFVVKKYSEVFTDWKDSIFSNYTYGNDTVTAVELGDRTLENIFSMSPIEDVELAKHRVRKGSFFLQDLDTLPNFTSEGYGSIRRVYVLGEEDSIFSRDFQLWQINNYKPDKVYCVPGADHKIMISRVNELAQILQEVANSASDLLAV

SEQ ID NO: 377 - DNA, 780 bp, synthetic construct
  misc_feature 1..780: note = Description of Artificial Sequence: Synthetic polynucleotide
  source 1..780: mol_type = other DNA
atgagtgcgcattttattctgatccacagtatctgccatggcgcctggctgtggtataaactgatcccgttattacagtctgcaggtcataccgttacggcgattgatcttgtcgctagcgggagtaatcctcaccaactggaagaaattggcacatggcgccagtactcagaaccattgttcaccctgatcgaatcgattccggaaggtaagaaagtcattctggtaggagaagcggggggcggcatcaatattgcactggccgcggagaaatatccggagaaagtgagcgctctcgtctttgtgaacggtcttatgcccgatatctcgcacagtccagcgttcgtggtaaagaaatatagcgaagttttcactgactggaaagattcgattttcagcaattatacctacggtaacgacacggtcaccgcggttgaattgggagatcgtaccctggagaatatcttctccatgtctccgattgaagatgtagaactggcgaaacatcgtgtccgcaaaggctccttttttctgcaagacttggatacgcagccgaactttacgtcggaagggtatggttcaattcgtcgtgtgtatgtttacggcgaagaagacagcatttttagccgcgattttcagttatggcaaattaataattataagcctgataaagtgtactgtgtaccgggtgctgaccacaagattatgatcagccgcgtcaacgagctggcccagattctccaggaagttgcaaactctgcgagcgatcttcttgcggtg

SEQ ID NO: 378 - protein, 260 aa, synthetic construct
  REGION 1..260: note = Description of Artificial Sequence: Synthetic polypeptide
MSAHFILIHSICHGAWLWYKLIPLLQSAGHTVTAIDLVASGSNPHQLEEIGTWRQYSEPLFTLIESIPEGKKVILVGEAGGGINIALAAEKYPEKVSALVFVNGLMPDISHSPAFVVKKYSEVFTDWKDSIFSNYTYGNDTVTAVELGDRTLENIFSMSPIEDVELAKHRVRKGSFFLQDLDTQPNFTSEGYGSIRRVYVYGEEDSIFSRDFQLWQINNYKPDKVYCVPGADHKIMISRVNELAQILQEVANSASDLLAV

SEQ ID NO: 379 - DNA, 780 bp, synthetic construct
  misc_feature 1..780: note = Description of Artificial Sequence: Synthetic polynucleotide
  source 1..780: mol_type = other DNA
atgagtgcgcattttattctgatccacagtatctgccatggcgcctggctgtggtataaactgatcccgttattacagtctgcaggtcataccgttacggcgattgatcttgtcgctagcgggagtaatcctcaccaactggaagaaattggcacatggcgccagtactcagaaccattgttcaccctgatcgaatcgattccggaaggtaagaaagtcattctggtaggagaagcggggggcggcatcaatattgcactggccgcggagaaatatccggagaaagtgagcgctctcgtctttgtgaacggtcttatgcccgatatctcgcacagtccagcgttcgtggtaaagaaatatagcgaagttttcactgactggaaagattcgattttcagcaattatacctacggtaacgacacggtcaccgcggttgaattgggagatcgtaccctggagaatatcttctccatgtctccgattgaagatgtagaactggcgaaacatcgtgtccgcaaaggctccttttttctgcaagacttggatacgctgccgaactttacgtcggaagggtatggttcaattcgtcgtgtgtatgttgagggcgaagaagacagcatttttagccgcgattttcagttatggcaaattaataattataagcctgataaagtgtactgtgtaccgggtgctgaccacaagattatgatcagccgcgtcaacgagctggcccagattctccaggaagttgcaaactctgcgagcgatcttcttgcggtg

SEQ ID NO: 380 - protein, 260 aa, synthetic construct
  REGION 1..260: note = Description of Artificial Sequence: Synthetic polypeptide
MSAHFILIHSICHGAWLWYKLIPLLQSAGHTVTAIDLVASGSNPHQLEEIGTWRQYSEPLFTLIESIPEGKKVILVGEAGGGINIALAAEKYPEKVSALVFVNGLMPDISHSPAFVVKKYSEVFTDWKDSIFSNYTYGNDTVTAVELGDRTLENIFSMSPIEDVELAKHRVRKGSFFLQDLDTLPNFTSEGYGSIRRVYVEGEEDSIFSRDFQLWQINNYKPDKVYCVPGADHKIMISRVNELAQILQEVANSASDLLAV

SEQ ID NO: 381 - DNA, 780 bp, synthetic construct
  misc_feature 1..780: note = Description of Artificial Sequence: Synthetic polynucleotide
  source 1..780: mol_type = other DNA
atgagtgcgcattttattctgatccacagtatctgccatggcgcctggctgtggtataaactgatcccgttattacagtctgcaggtcataccgttacggcgattgatcttgtcgctagcgggagtaatcctcaccaactggaagaaattggcacatggcgccagtactcagaaccattgttcaccctgatcgaatcgattccggaaggtaagaaagtcattctggtaggagaagcggggggcggcatcaatattgcactggccgcggagaaatatccggagaaagtgagcgctctcgtctttgtgaacggtcttatgcccgatatctcgcacagtccagcgttcgtggtaaagaaatatagcgaagttttcactgactggaaagattcgattttcagcaattatacctacggtaacgacacggtcaccgcggttgaattgggagatcgtaccattgagaatatcttctccatgtctccgattgaagatgtagaactggcgaaacatcgtgtccgcaaaggctccttttttctgcaagacttggatacgctgccgaactttacgtcggaagggtatggttcaattcgtcgtgtgtatgtttacggcgaagaagacagcatttttagccgcgattttcagttatggcaaattaataattataagcctgataaagtgtactgtgtaccgggtgctgaccacaagattatgatcagccgcgtcaacgagctggcccagattctccaggaagttgcaaactctgcgagcgatcttcttgcggtg

SEQ ID NO: 382 - protein, 260 aa, synthetic construct
  REGION 1..260: note = Description of Artificial Sequence: Synthetic polypeptide
MSAHFILIHSICHGAWLWYKLIPLLQSAGHTVTAIDLVASGSNPHQLEEIGTWRQYSEPLFTLIESIPEGKKVILVGEAGGGINIALAAEKYPEKVSALVFVNGLMPDISHSPAFVVKKYSEVFTDWKDSIFSNYTYGNDTVTAVELGDRTIENIFSMSPIEDVELAKHRVRKGSFFLQDLDTLPNFTSEGYGSIRRVYVYGEEDSIFSRDFQLWQINNYKPDKVYCVPGADHKIMISRVNELAQILQEVANSASDLLAV

SEQ ID NO: 383 - DNA, 780 bp, synthetic construct
  misc_feature 1..780: note = Description of Artificial Sequence: Synthetic polynucleotide
  source 1..780: mol_type = other DNA
atgagtgcgcattttattctgatccacagtatctgccatggcgcctggctgtggtataaactgatcccgttattacagtctgcaggtcataccgttacggcgattgatcttgtcgctagcgggagtaatcctcaccaactggaagaaattggcacatggcgccagtactcagaaccattgttcaccctgatcgaatcgattccggaaggtaagaaagtcattctggtaggagaagcggggggcggcatcaatattgcactggccgcggagaaatatccggagaaagtgagcgctctcgtctttgtgaacggtcttatgcccgatatctcgcacagtccagcgttcgtggtaaagaaatatagcgaagttttcactgactggaaagattcgattttcagcaattatacctacggtaacgacacggtcaccgcggttgaattgggagatcgtaccctggagaatatcttctccatgtctccgattgaagatgtagaactggcgaaacgtcgtgtccgcaaaggctccttttttctgcaagacttggatacgctgccgaactttacgtcggaagggtatggttcaattcgtcgtgtgtatgtttacggcgaagaagacagcatttttagccgcgattttcagttatggcaaattaataattataagcctgataaagtgtactgtgtaccgggtgctgaccacaagattatgatcagccgcgtcaacgagctggcccagattctccaggaagttgcaaactctgcgagcgatcttcttgcggtg

SEQ ID NO: 384 - protein, 260 aa, synthetic construct
  REGION 1..260: note = Description of Artificial Sequence: Synthetic polypeptide
MSAHFILIHSICHGAWLWYKLIPLLQSAGHTVTAIDLVASGSNPHQLEEIGTWRQYSEPLFTLIESIPEGKKVILVGEAGGGINIALAAEKYPEKVSALVFVNGLMPDISHSPAFVVKKYSEVFTDWKDSIFSNYTYGNDTVTAVELGDRTLENIFSMSPIEDVELAKRRVRKGSFFLQDLDTLPNFTSEGYGSIRRVYVYGEEDSIFSRDFQLWQINNYKPDKVYCVPGADHKIMISRVNELAQILQEVANSASDLLAV

SEQ ID NO: 385 - DNA, 780 bp, synthetic construct
  misc_feature 1..780: note = Description of Artificial Sequence: Synthetic polynucleotide
  source 1..780: mol_type = other DNA
atgagtgcgcattttattctgatccacagtatctgccatggcgcctggctgtggtataaactgatcccgttattacagtctgcaggtcataccgttacggcgattgatcttgtcgctagcgggagtaatcctcaccaactggaagaaattggcacatggcgccagtactcagaaccattgttcaccctgatcgaatcgattccggaaggtaagaaagtcattctggtaggagaagcggggggcggcatcaatattgcactggccgcggagaaatatccggagaaagtgagcgctctcgtctttgtgaacggtcttatgcccgatatctcgcacagtccagcgttcgtggtaaagaaatatagcgaagttttcactgactggaaagattcgattttcagcaattatacctacggtaacgacacggtcaccgcggttgaattgggagatcgtaccctggagaatatcttctccatgtctccgattgaagatttggaactggcgaaacatcgtgtccgcaaaggctccttttttctgcaagacttggatacgctgccgaactttacgtcggaagggtatggttcaattcgtcgtgtgtatgtttacggcgaagaagacagcatttttagccgcgattttcagttatggcaaattaataattataagcctgataaagtgtactgtgtaccgggtgctgaccacaagattatgatcagccgcgtcaacgagctggcccagattctccaggaagttgcaaactctgcgagcgatcttcttgcggtg

SEQ ID NO: 386 - protein, 260 aa, synthetic construct
  REGION 1..260: note = Description of Artificial Sequence: Synthetic polypeptide
MSAHFILIHSICHGAWLWYKLIPLLQSAGHTVTAIDLVASGSNPHQLEEIGTWRQYSEPLFTLIESIPEGKKVILVGEAGGGINIALAAEKYPEKVSALVFVNGLMPDISHSPAFVVKKYSEVFTDWKDSIFSNYTYGNDTVTAVELGDRTLENIFSMSPIEDLELAKHRVRKGSFFLQDLDTLPNFTSEGYGSIRRVYVYGEEDSIFSRDFQLWQINNYKPDKVYCVPGADHKIMISRVNELAQILQEVANSASDLLAV

SEQ ID NO: 387 - DNA, 780 bp, synthetic construct
  misc_feature 1..780: note = Description of Artificial Sequence: Synthetic polynucleotide
  source 1..780: mol_type = other DNA
atgagtgcgcattttattctgatccacagtatctgccatggcgcctggctgtggtataaactgatcccgttattacagtctgcaggtcataccgttacggcgattgatcttgtcgctagcgggagtaatcctcaccaactggaagaaattggcacatggcgccagtactcagaaccattgttcacccagatcgaatcgattccggaaggtaagaaagtcattctggtaggagaagcggggggcggcatcaatattgcactggccgcggagaaatatccggagaaagtgagcgctctcgtctttgtgaacggtcttatgcccgatatctcgcacagtccagcgttcgtggtaaagaaatatagcgaagttttcactgactggaaagattcgattttcagcaattatacctacggtaacgacacggtcaccgcggttgaattgggagatcgtaccctggagaatatcttctccatgtctccgattgaagatgtagaactggcgaaacatcgtgtccgcaaaggctccttttttctgcaagacttggatacgctgccgaactttacgtcggaagggtatggttcaattcgtcgtgtgtatgtttacggcgaagaagacagcatttttagccgcgattttcagttatggcaaattaataattataagcctgataaagtgtactgtgtaccgggtgctgaccacaagattatgatcagccgcgtcaacgagctggcccagattctccaggaagttgcaaactctgcgagcgatcttcttgcggtg

SEQ ID NO: 388 - protein, 260 aa, synthetic construct
  REGION 1..260: note = Description of Artificial Sequence: Synthetic polypeptide
MSAHFILIHSICHGAWLWYKLIPLLQSAGHTVTAIDLVASGSNPHQLEEIGTWRQYSEPLFTQIESIPEGKKVILVGEAGGGINIALAAEKYPEKVSALVFVNGLMPDISHSPAFVVKKYSEVFTDWKDSIFSNYTYGNDTVTAVELGDRTLENIFSMSPIEDVELAKHRVRKGSFFLQDLDTLPNFTSEGYGSIRRVYVYGEEDSIFSRDFQLWQINNYKPDKVYCVPGADHKIMISRVNELAQILQEVANSASDLLAV

SEQ ID NO: 389 - DNA, 780 bp, synthetic construct
  misc_feature 1..780: note = Description of Artificial Sequence: Synthetic polynucleotide
  source 1..780: mol_type = other DNA
atgagtgcgcattttattctgatccacagtatctgccatggcgcctggctgtggtataaactgatcccgttattacagtctgcaggtcataccgttacggcgattgatcttgtcgctagcgggagtaatcctcaccaactggaagaaattggcacatggcgccagtactcagaaccattgttcaccctgatcgaatcgattccggaaggtaagaaagtcattctggtaggagaagcggggggcggcatcaatattgcactggccgcggagaaatatccggagaaagtgagcgctctcgtctttgtgaacggtcttatgcccgatatctcgcacagtccagcgttcgtggtaaagaaatatagcgaagttgatactgactggaaagattcgattttcagcaattatacctacggtaacgacacggtcaccgcggttgaattgggagatcgtaccctggagaatatcttctccatgtctccgattgaagatgtagaactggcgaaacatcgtgtccgcaaaggctccttttttctgcaagacttggatacgctgccgaactttacgtcggaagggtatggttcaattcgtcgtgtgtatgtttacggcgaagaagacagcatttttagccgcgattttcagttatggcaaattaataattataagcctgataaagtgtactgtgtaccgggtgctgaccacaagattatgatcagccgcgtcaacgagctggcccagattctccaggaagttgcaaactctgcgagcgatcttcttgcggtg

SEQ ID NO: 390 - protein, 260 aa, synthetic construct
  REGION 1..260: note = Description of Artificial Sequence: Synthetic polypeptide
MSAHFILIHSICHGAWLWYKLIPLLQSAGHTVTAIDLVASGSNPHQLEEIGTWRQYSEPLFTLIESIPEGKKVILVGEAGGGINIALAAEKYPEKVSALVFVNGLMPDISHSPAFVVKKYSEVDTDWKDSIFSNYTYGNDTVTAVELGDRTLENIFSMSPIEDVELAKHRVRKGSFFLQDLDTLPNFTSEGYGSIRRVYVYGEEDSIFSRDFQLWQINNYKPDKVYCVPGADHKIMISRVNELAQILQEVANSASDLLAV

SEQ ID NO: 391 - DNA, 780 bp, synthetic construct
  misc_feature 1..780: note = Description of Artificial Sequence: Synthetic polynucleotide
  source 1..780: mol_type = other DNA
atgagtgcgcattttattctgatccacagtatctgccatggcgcctggctgtggtataaactgatcccgttattacagtctgcaggtcataccgttacggcgattgatcttgtcgctagcgggagtaatcctcaccaactggaagaaattggcacatggcgccagtactcagaaccattgttcaccctgatcgaatcgattccggaaggtaagaaagtcattctggtaggagaagcggggggcggcatcaatattgcactggccgcggagaaatatccggagaaagtgagcgctctcgtctttgtgaacggtcttatgcccgatatctcgcacagtccagcgttcgtggtaaagaaatatagcgaagttttcactgactggaaagattcgattttcagcaattatacctacggtaacgacacggtcaccgcggttgaattgggagatcgtaccctggagaatatcttctccatgtctccgattgaagatgtagaactggcgaaacatcgtgtccgcaaaggctccttttttctgcaagacttggatacgctgccgaactttacgtcggaagggtatggttcaattcgtcgtgtgtatgtttctggcgaagaagacagcatttttagccgcgattttcagttatggcaaattaataattataagcctgataaagtgtactgtgtaccgggtgctgaccacaagattatgatcagccgcgtcaacgagctggcccagattctccaggaagttgcaaactctgcgagcgatcttcttgcggtg

SEQ ID NO: 392 - protein, 260 aa, synthetic construct
  REGION 1..260: note = Description of Artificial Sequence: Synthetic polypeptide
MSAHFILIHSICHGAWLWYKLIPLLQSAGHTVTAIDLVASGSNPHQLEEIGTWRQYSEPLFTLIESIPEGKKVILVGEAGGGINIALAAEKYPEKVSALVFVNGLMPDISHSPAFVVKKYSEVFTDWKDSIFSNYTYGNDTVTAVELGDRTLENIFSMSPIEDVELAKHRVRKGSFFLQDLDTLPNFTSEGYGSIRRVYVSGEEDSIFSRDFQLWQINNYKPDKVYCVPGADHKIMISRVNELAQILQEVANSASDLLAV

SEQ ID NO: 393 - DNA, 780 bp, synthetic construct
  misc_feature 1..780: note = Description of Artificial Sequence: Synthetic polynucleotide
  source 1..780: mol_type = other DNA
atgagtgcgcattttattctgatccacagtatctgccatggcgcctggctgtggtataaactgatcccgttattacagtctgcaggtcataccgttacggcgattgatcttgtcgctagtgggagtaatcctcaccaactggaagacattggcacatggggtcagtactcagaaccattgttcaccctgatcgaatcgattccggaaggtaagaaagtcattctggtaggagaagcggggggcggcatcaatattgcactggccgcggagaaatatccggagaaagtgagcgctctcgtctttgtgaacggtcttatgcccgatatctcgcacagtccagcgttcgtggtaaagaaatatagcgaagttttcactgactggaaagattcgatcttcagcaattatacctacggtaacgacacggtcaccgcggttaaattgggagatcgtctgctggagaatatcttctccatgtctccgattgaagatgtagaactggcgaaacatcgtgtccgcaaaggctccttttttctgcaagacttggatcgcctgccgaactttacgtcggaagggtatggtggtattcgtcgtgtgtatgtttacggcgaagaagaccaggtttttagccgcgattttcagttatggcaaattaataattataagcctgataaagtgtactgtgtaccgggtgctgaccacaagattatgatcagccgcgtcaacgagctggcccagattctcggggaagttgcaaactctgcgtcggaccttcttgcggtg

SEQ ID NO: 394 - protein, 260 aa, synthetic construct
  REGION 1..260: note = Description of Artificial Sequence: Synthetic polypeptide
MSAHFILIHSICHGAWLWYKLIPLLQSAGHTVTAIDLVASGSNPHQLEDIGTWGQYSEPLFTLIESIPEGKKVILVGEAGGGINIALAAEKYPEKVSALVFVNGLMPDISHSPAFVVKKYSEVFTDWKDSIFSNYTYGNDTVTAVKLGDRLLENIFSMSPIEDVELAKHRVRKGSFFLQDLDRLPNFTSEGYGGIRRVYVYGEEDQVFSRDFQLWQINNYKPDKVYCVPGADHKIMISRVNELAQILGEVANSASDLLAV

SEQ ID NO: 395 - DNA, 765 bp, synthetic construct
  misc_feature 1..765: note = Description of Artificial Sequence: Synthetic polynucleotide
  source 1..765: mol_type = other DNA
atgagtgcgcattttattctgatccacagtatctgccatggcgcctggctgtggtataaactgatcccgttattacagtctgcaggtcataccgttacggcgattgatcttgtcgcttgtgggagtaatcctcaccaactggaagacattggcacatggggtcagtactcagaaccattgttcaccctgatcgaatcgattccggaaggtaagaaagtcattctggtaggagaagcggggggcggcatcaatattgcactggccgcggagaaatatccggagaaagtgagcgctctcgtctttgtgaacggtcttatgcccgatatctcgcacagtccagcgttcgtggtaaagaaatatagcgaagttttcactgactggaaagattcgatcttcagcaattatacctacggtaacgacacggtcaccgcggttaaattgggagatcgtctgctggagaatatcttctccatgtctccgattgaagatgtagaactggcgaaacatcgtgtccgcaaaggctccttttttctgcaagacttggatcgcctgccgaactttacgtcggaagggtatggtggtattcgtcgtgtgtatgtttacggcgaagaagaccaggtttttagccgcgattttcagttatggcaaattaataattataagcctgataaagtgtactgtgtaccgggtgctgaccacaagattatgatcagccgcgtcaacgagctggcccagattctcggggaagttgcaaactctgcgtcg

SEQ ID NO: 396 - protein, 255 aa, synthetic construct
  REGION 1..255: note = Description of Artificial Sequence: Synthetic polypeptide
MSAHFILIHSICHGAWLWYKLIPLLQSAGHTVTAIDLVACGSNPHQLEDIGTWGQYSEPLFTLIESIPEGKKVILVGEAGGGINIALAAEKYPEKVSALVFVNGLMPDISHSPAFVVKKYSEVFTDWKDSIFSNYTYGNDTVTAVKLGDRLLENIFSMSPIEDVELAKHRVRKGSFFLQDLDRLPNFTSEGYGGIRRVYVYGEEDQVFSRDFQLWQINNYKPDKVYCVPGADHKIMISRVNELAQILGEVANSAS

SEQ ID NO: 397 - DNA, 780 bp, synthetic construct
  misc_feature 1..780: note = Description of Artificial Sequence: Synthetic polynucleotide
  source 1..780: mol_type = other DNA
atgagtgcgcattttattctgatccacagtatctgccatggcgcctggctgtggtataaactgatcccgttattacagtctgcaggtcataccgttacggcgattgatcttgtcgctagcgggagtaatcctcaccaactggaagatattggcacatggggtcagtactcagaaccattgttcaccctgatcgaatcgattccggaaggtaagaaagtcattctggtaggagaagcggggggcggcatcaatattgcactggccgcggagaaatatccggagaaagtgagcgggctcgtctttgtgaacggtcttatgcccgatatctcgcacagtccagcgttcgtggtaaagaaatatagcgaagttttcactgactggaaagattcgatcttcagcaattatacctacggtaacgacacggtcaccgcggttaaattgggagatcgtctgctggagaatatcttctccatgtctccgattgaagatgtagaactggcgaaacatcgtgtccgcaaaggctccttttttctgcaagacttggatcgcctgccgaactttacgtcggaagggtatggtggtattcgtcgtgtgtatgtttacggcgaagaagaccaggtttttagccgcgattttcagttatggcaaattaataattataagcctgataaagtgtactgtgtaccgggtgctgaccacaagattatgatcagccgcgtcaacgagctggcccagattctcggggaagttgcaaactctgcgtcggaccttcttgcggtg

SEQ ID NO: 398 - protein, 260 aa, synthetic construct
  REGION 1..260: note = Description of Artificial Sequence: Synthetic polypeptide
MSAHFILIHSICHGAWLWYKLIPLLQSAGHTVTAIDLVASGSNPHQLEDIGTWGQYSEPLFTLIESIPEGKKVILVGEAGGGINIALAAEKYPEKVSGLVFVNGLMPDISHSPAFVVKKYSEVFTDWKDSIFSNYTYGNDTVTAVKLGDRLLENIFSMSPIEDVELAKHRVRKGSFFLQDLDRLPNFTSEGYGGIRRVYVYGEEDQVFSRDFQLWQINNYKPDKVYCVPGADHKIMISRVNELAQILGEVANSASDLLAV

SEQ ID NO: 399 - DNA, 765 bp, synthetic construct
  misc_feature 1..765: note = Description of Artificial Sequence: Synthetic polynucleotide
  source 1..765: mol_type = other DNA
atgagtgcgcattttattctgatccacagtatctgccatggcgcctggctgtggtataaactgatcccgttattacagtctgcaggtcataccgttacggcgattgatcttgtcgctagcgggagtaatcctcaccaactggaagaaattggcacatggggtcagtactcagaaccattgttcaccctgatcgaatcgattccggaaggtaagaaagtcattctggtaggagaagcggggggcggcatcaatattgcactggccgcggagaaatatccggagaaagtgagcgcgctcgtctttgtgaacggtcttatgcccgatatctcgcacagtccagcgttcgtggtaaagaaatatagcgaagttttcactgactggaaagattcgatcttcagcaattatacctacggtaacgacacggtcaccgcggttaaattgggagatcgtctgctggagaatatcttctccatgtctccgattgaagatgtagaactggcgaaacatcgtgtccgcaaaggctccttttttctgcaagacttggatcgcctgccgaactttacgtcggaagggtatggtggtattcgtcgtgtgtatgtttacggcgaagaagaccaggtttttagccgcgattttcagttatggcaaattaataattataagcctgataaagtgtactgtgtaccgggtgctgaccacaagattatgatcagccgcgtcaacgagctggcccagattctcggggaagttgcaaactctgcgtcg

SEQ ID NO: 400 - protein, 255 aa, synthetic construct
  REGION 1..255: note = Description of Artificial Sequence: Synthetic polypeptide
MSAHFILIHSICHGAWLWYKLIPLLQSAGHTVTAIDLVASGSNPHQLEEIGTWGQYSEPLFTLIESIPEGKKVILVGEAGGGINIALAAEKYPEKVSALVFVNGLMPDISHSPAFVVKKYSEVFTDWKDSIFSNYTYGNDTVTAVKLGDRLLENIFSMSPIEDVELAKHRVRKGSFFLQDLDRLPNFTSEGYGGIRRVYVYGEEDQVFSRDFQLWQINNYKPDKVYCVPGADHKIMISRVNELAQILGEVANSAS

SEQ ID NO: 401 - DNA, 765 bp, synthetic construct
  misc_feature 1..765: note = Description of Artificial Sequence: Synthetic polynucleotide
  source 1..765: mol_type = other DNA
atgagtgcgcatttcattctgatccacagtatctgtcatggcgcctggctgtggtataaactgatcccgttattacagtctgcaggtcataccgttacggcgattgatcttgtcgctagcgggagtaatcctcaccaactggaagatattggcacatggggtcagtactcagaaccattgttcaccctgatcgaatcgattccggaaggtaagaaagtcattctggtaggagaagcggggggcggcatcaatattgcactggccgcggagaaatatccggagaaagtgagcgctctcgtctttgtgaacggtcttatgcccgacatcagccacagtccagcgttccaagtaaagaaatatagcgaagttttcactgactggaaagattcgatcttcagcaattatacctacggtaacgacacggtcaccgcggttaaattgggagatcgtctgctggagaatatcttctccatgtctccgattgaagatgtagaactggcgaaacatcgtgtccgcaaaggctccttttttctgcaagacttggatcgcctgccgaactttacgtcggaagggtatggtggtattcgtcgtgtgtatgtttacggcgaagaagaccaggtttttagccgcgattttcagttatggcaaattaataattataagcctgataaagtgtactgtgtaccgggtggtgaccacaagattatgatcagccgcgtcaacgagctggcccagattctcggggaagttgcaaactctgcgtcg

SEQ ID NO: 402 - protein, 255 aa, synthetic construct
  REGION 1..255: note = Description of Artificial Sequence: Synthetic polypeptide
MSAHFILIHSICHGAWLWYKLIPLLQSAGHTVTAIDLVASGSNPHQLEDIGTWGQYSEPLFTLIESIPEGKKVILVGEAGGGINIALAAEKYPEKVSALVFVNGLMPDISHSPAFQVKKYSEVFTDWKDSIFSNYTYGNDTVTAVKLGDRLLENIFSMSPIEDVELAKHRVRKGSFFLQDLDRLPNFTSEGYGGIRRVYVYGEEDQVFSRDFQLWQINNYKPDKVYCVPGGDHKIMISRVNELAQILGEVANSAS

SEQ ID NO: 403 - DNA, 765 bp, synthetic construct
  misc_feature 1..765: note = Description of Artificial Sequence: Synthetic polynucleotide
  source 1..765: mol_type = other DNA
atgagtgcgcatgtcattctgatccacagtatctgtcatggcgcctggctgtggtataaactgatcccgttattacagtctgcaggtcataccgttacggcgattgatcttgtcgctagcgggagtaatcctcaccaactggaagaaattggcacatggggtcagtactcagaaccattgttcaccctgatcgaatcgattccggaaggtaagaaagtcattctggtaggagaagcggggggcggcatcaatattgcactggccgcggagaaatatccggagaaagtgagcgctctcgtctttgtgaacggtcttatgcccgatatctcgcacagtccagcgttcgtggtaaagaaatatagcgaagttttcactgactggaaagattcgatcttcagcaattatacctacggtaacgacacggtcaccgcggttaaattgggagatcgtctgctggagaatatcttctccatgtctccgattgaagatgtagaactggcgaaacatcgtgtccgcaaaggctccttttttctgcaagacttggatcgcctgccgaactttacgtcggaagggtatggtggtattcgtcgtgtgtatgtttacggcgaagaagaccaggtttttagccgcgattttcagttatggcaaattaataattataagcctgataaagtgtactgtgtaccgggtgctgaccacaagattatgatcagccgcgtcaacgagctggcccagattctcggggaagttgcaaactctgcgtcg

SEQ ID NO: 404 - protein, 255 aa, synthetic construct
  REGION 1..255: note = Description of Artificial Sequence: Synthetic polypeptide
MSAHVILIHSICHGAWLWYKLIPLLQSAGHTVTAIDLVASGSNPHQLEEIGTWGQYSEPLFTLIESIPEGKKVILVGEAGGGINIALAAEKYPEKVSALVFVNGLMPDISHSPAFVVKKYSEVFTDWKDSIFSNYTYGNDTVTAVKLGDRLLENIFSMSPIEDVELAKHRVRKGSFFLQDLDRLPNFTSEGYGGIRRVYVYGEEDQVFSRDFQLWQINNYKPDKVYCVPGADHKIMISRVNELAQILGEVANSAS

SEQ ID NO: 405 - DNA, 765 bp, synthetic construct
  misc_feature 1..765: note = Description of Artificial Sequence: Synthetic polynucleotide
  source 1..765: mol_type = other DNA
atgagtgcgcattttattctgatccacagtatctgtcatggcgcctggctgtggtataaactgatcccgttattacagtctgcaggtcataccgttacggcgattgatcttgtcgctagcgggagtaatcctcaccaactggaagacattggcacatggggtcagtactcagaaccattgttcaccctgatcgaatcgattccggaaggtaagaaagtcattctggtaggagaagcggggggcggcatcaatattgcactggccgcggagaaatatccggagaaagtgagcgctctcgtctttgtgaacggtcttatgcccgatatctcgcacagtccagcgttcgtggtaaagaaatatagcgaagttttcactgactggaaagattcgatcttcagcaattatacctacggtaacgacacggtcaccgcggttgagttgggagatcgtctgctggagaatatcttctccatgtctccgattgaagatgtagaactggcgaaacatcgtgtccgcaaaggctccttttttctgcaagacttggatcgcctgccgaactttacgtcggaagggtatggtggtattcgtcgtgtgggggtttacggcgaagaagaccaggtttttagccgcgattttcagttatggcaaattaataattataagcctgataaagtgtactgtgtaccgggtggtgaccacaagattatgatcagccgcgtcaacgagctggcccagattctcggggaagttgcaaactctgcgtcg

SEQ ID NO: 406 - protein, 255 aa, synthetic construct
  REGION 1..255: note = Description of Artificial Sequence: Synthetic polypeptide
MSAHFILIHSICHGAWLWYKLIPLLQSAGHTVTAIDLVASGSNPHQLEDIGTWGQYSEPLFTLIESIPEGKKVILVGEAGGGINIALAAEKYPEKVSALVFVNGLMPDISHSPAFVVKKYSEVFTDWKDSIFSNYTYGNDTVTAVELGDRLLENIFSMSPIEDVELAKHRVRKGSFFLQDLDRLPNFTSEGYGGIRRVGVYGEEDQVFSRDFQLWQINNYKPDKVYCVPGGDHKIMISRVNELAQILGEVANSAS

SEQ ID NO: 407 - DNA, 765 bp, synthetic construct
  misc_feature 1..765: note = Description of Artificial Sequence: Synthetic polynucleotide
  source 1..765: mol_type = other DNA
atgagtgcgcattttattctgatccacagtatctgccatggcgcctggctgtggtataaactgatcccgttattacagtctgcaggtcataccgttacggcgattgatcttgtcgctagcgggagtaatcctcaccaactggaagatattggcacatggggtcagtactcagaaccattgttcaccctgatcgaatcgattccggaaggtaagaaagtcattctggtaggagaagcggggggcggcatcaatattgcactggccgcggagaaatatccggagaaagtgagcgcgctcgtctttgtgaacggtcttatgcccgatatctcgcacagtccagcgttcgtggtaaagaaatatagcgaagttttcactgactggaaagattcgatcttcagcaattatacctacggtaacgacacggtcaccgcggttaaattgggagatcgtctgctggagaatatcttctccatgtctccgattgaagatgtagaactggcgaaacatcgtgtccgcaaaggctccttttttctgcaagacttggatcgcctgccgaactttacgtcggaagggtatggtggtattcgtcgtgtgtatgtttacggcgaagaagaccaggtttttagccgcgattttcagttatggcaaattaataattataagcctgataaagtgtactgtgtaccgggtggtgaccacaagattatgatcagccgcgtcaacgagctggcccagattctcggggaagttgcaaactctgcgtcg

SEQ ID NO: 408 - protein, 255 aa, synthetic construct
  REGION 1..255: note = Description of Artificial Sequence: Synthetic polypeptide
MSAHFILIHSICHGAWLWYKLIPLLQSAGHTVTAIDLVASGSNPHQLEDIGTWGQYSEPLFTLIESIPEGKKVILVGEAGGGINIALAAEKYPEKVSALVFVNGLMPDISHSPAFVVKKYSEVFTDWKDSIFSNYTYGNDTVTAVKLGDRLLENIFSMSPIEDVELAKHRVRKGSFFLQDLDRLPNFTSEGYGGIRRVYVYGEEDQVFSRDFQLWQINNYKPDKVYCVPGGDHKIMISRVNELAQILGEVANSAS

SEQ ID NO: 409 - DNA, 765 bp, synthetic construct
  misc_feature 1..765: note = Description of Artificial Sequence: Synthetic polynucleotide
  source 1..765: mol_type = other DNA
atgagtgcgcattttattctgatccacagtatctgccatggcgcctggctgtggtataaactgatcccgttattacagtctgcaggtcataccgttacggcgattgatcttgtcgctagcgggagtaatcctcaccaactggaagaaattggcacatggggtcagtactcagaaccattgttcaccctgatcgaatcgattccggaaggtaagaaagtcattctggtaggagaagcggggggcggcatcaatattgcactggccgcggagaaatatccggagaaagtgagcgctctcgtctttgtgaacggtcttatgcccgatatctcgcacagtccagcgttcgtggtaaagaaatatagcgaagttttcactgactggaaagattcgatcttcagcaattatacctacggtaacgacacggtcaccgcggttaaattgggagatcgtctgctggagaatatcttctccatgtctccgattgaagatgtagaactggcgaaacatcgtgtccgcaaaggctccttttttctgcaagacttggatcgcctgccgaactttacgtcggaagggtatggtggtattcgtcgtgtgtatgtttacggcgaagaagaccaggtttttagccgcgattttcagttatggcaaattaataattataagcctgataaagtgtactgtgtaccgggtggtgaccacaagattatgatcagccgcgtcaacgagctggcccagattctcggggaagttgcaaactctgcgtcg

SEQ ID NO: 410 - protein, 255 aa, synthetic construct
  REGION 1..255: note = Description of Artificial Sequence: Synthetic polypeptide
MSAHFILIHSICHGAWLWYKLIPLLQSAGHTVTAIDLVASGSNPHQLEEIGTWGQYSEPLFTLIESIPEGKKVILVGEAGGGINIALAAEKYPEKVSALVFVNGLMPDISHSPAFVVKKYSEVFTDWKDSIFSNYTYGNDTVTAVKLGDRLLENIFSMSPIEDVELAKHRVRKGSFFLQDLDRLPNFTSEGYGGIRRVYVYGEEDQVFSRDFQLWQINNYKPDKVYCVPGGDHKIMISRVNELAQILGEVANSAS

SEQ ID NO: 411 - DNA, 765 bp, synthetic construct
  misc_feature 1..765: note = Description of Artificial Sequence: Synthetic polynucleotide
  source 1..765: mol_type = other DNA
atgagtgcgcatgtcattctgatccacagtatctgtcatggcgcctggctgtggtataaactgatcccgttattacagtctgcaggtcataccgttacggcgattgatcttgtcgctagcgggagtaatcctcaccaactggaagacattggcacatggggtcagtactcagaaccattgttcaccctgatcgaatcgattccggaaggtaagaaagtcattctggtaggagaagcggggggcggcatcaatattgcactggccgcggagaaatatccggagaaagtgagcgcgctcgtctttgtgaacggtcttatgcccgatatctcgcacagtccagcgttcgtggtaaagaaatatagcgaagttttcactgactggaaagattcgatcttcagcaattatacctacggtaacgacacggtcaccgcggttaaattgggagatcgtctgctggagaatatcttctccatgtctccgattgaagatgtagaactggcgaaacatcgtgtccgcaaaggctccttttttctgcaagacttggatcgcctgccgaactttacgtcggaagggtatggtggtattcgtcgtgtgtatgtttacggcgaagaagaccaggtttttagccgcgattttcagttatggcaaattaataattataagcctgataaagtgtactgtgtaccgggtgctgaccacaagattatgatcagccgcgtcaacgagctggcccagattctcggggaagttgcaaactctgcgtcg

SEQ ID NO: 412 - protein, 255 aa, synthetic construct
  REGION 1..255: note = Description of Artificial Sequence: Synthetic polypeptide
MSAHVILIHSICHGAWLWYKLIPLLQSAGHTVTAIDLVASGSNPHQLEDIGTWGQYSEPLFTLIESIPEGKKVILVGEAGGGINIALAAEKYPEKVSALVFVNGLMPDISHSPAFVVKKYSEVFTDWKDSIFSNYTYGNDTVTAVKLGDRLLENIFSMSPIEDVELAKHRVRKGSFFLQDLDRLPNFTSEGYGGIRRVYVYGEEDQVFSRDFQLWQINNYKPDKVYCVPGADHKIMISRVNELAQILGEVANSAS

SEQ ID NO: 413 - DNA, 765 bp, synthetic construct
  misc_feature 1..765: note = Description of Artificial Sequence: Synthetic polynucleotide
  source 1..765: mol_type = other DNA
atgagtgcgcattttattctgatccacagtatctgccatggcgcctggctgtggtataaactgattccgttattacagggctggggtcataccgttacggcgattgatcttgtcgctagcgggagtaatcctcaccaactggaagaaattggcacatggggtcagtactcagaaccattgttcaccgccatcgaatcgattccggaaggtaagaaagtcattctggtaggagaagcggggggcggcatcaatattgcactggccgcggagaaatatccggagaaagtgagcgctctcgtctttgtgaacggtcttatgcccgatatctcgcacagcccagcgttcgtggtaaagaaatatagcgaagttttcactgactggaaagattcgatcttcagcaattatacctacggtaacgacacggtcaccgcggttaagttgggagatcgtctgctggagaatatcttctccatgtctccgattgaagatgtagaactggcgaaacatcgtgtccgcaaaggctccttttttctgcaagacttggatcgcctgccgaactttacgtcggaagggtatggtagtatccgtcgtgtgtatgtttgcggcgaagaagaccaggtttttagccgcgattttcagttatggcaaattaataattataagcctgataaagtgtactgtgtaccgggtggtgaccacaagattatgatcagccgcgtcaacgagctggcccagattctcggggaagttgcaaactctgcgtcg

SEQ ID NO: 414 - protein, 255 aa, synthetic construct
  REGION 1..255: note = Description of Artificial Sequence: Synthetic polypeptide
MSAHFILIHSICHGAWLWYKLIPLLQGWGHTVTAIDLVASGSNPHQLEEIGTWGQYSEPLFTAIESIPEGKKVILVGEAGGGINIALAAEKYPEKVSALVFVNGLMPDISHSPAFVVKKYSEVFTDWKDSIFSNYTYGNDTVTAVKLGDRLLENIFSMSPIEDVELAKHRVRKGSFFLQDLDRLPNFTSEGYGSIRRVYVCGEEDQVFSRDFQLWQINNYKPDKVYCVPGGDHKIMISRVNELAQILGEVANSAS

SEQ ID NO: 415 - DNA, 765 bp, synthetic construct
  misc_feature 1..765: note = Description of Artificial Sequence: Synthetic polynucleotide
  source 1..765: mol_type = other DNA
atgagtgcgcattttattctgatccacagtatctgccatggcgcctggatttggtataaactgattccgttattacagagcgccggtcataccgttacggcgattgatcttgtcgctagcgggagtaatcctcaccaactggaagaaattggcacatggggtcagtactcagaaccattgttcaccgccatcgaatcgattccggaaggtaagaaagtcattctggtaggagaagcggggggcggcatcaatattgcactggccgcggagaaatatccggagaaagtgagcgctctcgtctttgtgaacggtcttatgcccgatatctcgcacggcccagcgttcgtggtaaagaaatatagcgaagttttcactgactggaaagattcgatcttcagcaattatacctacggtaacgacacggtcaccgcggttaaattgggagatcgtctgctggagaatatcttctccatgtctccgattgaagatgtagaactggcgaaacatcgtgtccgcaaaggctccttttttctgcaagacttggatcgcctgccgaactttacgtcggaagggtatggtggtatccgtcgtgtgtatgtttacggcgaagaagaccaggtctttagccgcgattttcagttatggcaaattaataattataagcctgataaagtgctgtgtgtaccgggtggtgaccacaagattatgatcagccgcgtcaacgagctggcccagattctcggggaagttgcaaactctgcgtcg

SEQ ID NO: 416 - protein, 255 aa, synthetic construct
  REGION 1..255: note = Description of Artificial Sequence: Synthetic polypeptide
MSAHFILIHSICHGAWIWYKLIPLLQSAGHTVTAIDLVASGSNPHQLEEIGTWGQYSEPLFTAIESIPEGKKVILVGEAGGGINIALAAEKYPEKVSALVFVNGLMPDISHGPAFVVKKYSEVFTDWKDSIFSNYTYGNDTVTAVKLGDRLLENIFSMSPIEDVELAKHRVRKGSFFLQDLDRLPNFTSEGYGGIRRVYVYGEEDQVFSRDFQLWQINNYKPDKVLCVPGGDHKIMISRVNELAQILGEVANSAS

SEQ ID NO: 417 - DNA, 765 bp, synthetic construct
  misc_feature 1..765: note = Description of Artificial Sequence: Synthetic polynucleotide
  source 1..765: mol_type = other DNA
atgagtgcgcattttattctgatccacagtatctgccatggcgcctggatttggtataaactgggtccgttattacagagcgccggtcataccgttacggcgattgatcttgtcgctagcgggagtaatcctcaccaactggaagaaattggcacatggggtcagtactcagaaccattgttcacccagatcgaatcgattccggaaggtaagaaagtcattctggtaggagaagcggggggcggcatcaatattgcactggccgcggagaaatatccggagaaagtgagcgctctcgtctttgtgaacggtcttatgcccgatatctcgcacggcccagcgttcgtggtaaagaaatatagcgaagttttcactgactggaaagattcgatcttcagcaattatacctacggtaacgacacagtcaccgcggttgagttgggagatcgtctgctggagaatatcttctccatgtctccgattgaagatgtagaactggcgaaacaccgtgtccgcaaaggctccttttttctgcaagacttggatcgcctgccgaactttacgtcggaagggtatggtggtatccgtcgtgtgtatgtttacggcgaagaagaccaggtttttagccgcgattttcagttatggcaaattaataattataagcctgataaagtgtactgtgtaccgggtggtgaccacaagattatgatcagccgcgtcaacgagctggcccagattctccaggaagttgcaaactctgcgtcg

SEQ ID NO: 418 - protein, 255 aa, synthetic construct
  REGION 1..255: note = Description of Artificial Sequence: Synthetic polypeptide
MSAHFILIHSICHGAWIWYKLGPLLQSAGHTVTAIDLVASGSNPHQLEEIGTWGQYSEPLFTQIESIPEGKKVILVGEAGGGINIALAAEKYPEKVSALVFVNGLMPDISHGPAFVVKKYSEVFTDWKDSIFSNYTYGNDTVTAVELGDRLLENIFSMSPIEDVELAKHRVRKGSFFLQDLDRLPNFTSEGYGGIRRVYVYGEEDQVFSRDFQLWQINNYKPDKVYCVPGGDHKIMISRVNELAQILQEVANSAS

SEQ ID NO: 419 - DNA, 765 bp, synthetic construct
  misc_feature 1..765: note = Description of Artificial Sequence: Synthetic polynucleotide
  source 1..765: mol_type = other DNA
atgagtgcgcattttattctgatccacagtatctgccatggcgcctggctgtggtataaactgcgtccgttattacagggctggggtcataccgttacggcgattgatcttgtcgctagcgggagtaatcctcaccaactggaagaaattggcacatggggtcagtactcagaaccattgttcaccctgatcgaatcgattccggaaggtaagaaagtcattctggtaggagaagcggggggcggcatcaatattgcactggccgcggagaaatatccggagaaagtgagcgctctcgtctttgtgaacggtcttatgcccgatatctcgcacagtccagcgttcgtggtaaagaaatatagcgaagttttcactgactggaaagattcgatcttcagcaattatacctacggtaacgacacggtcaccgcggttaagttgggagatcgtctgctggagaatatcttctccatgtctccgattgaagatgtagaactggcgaaacgccgtgtccgcaaaggctccttttttctgcaagacttggatcgcctgccgaactttacgtcggaagggtatggtagtagccgtcgtgtgtatgtttacggcgaagaagaccaggtttttagccgcgattttcagttatggcaaattaataattataagcctgataaagtgtactgtgtaccgggtggtgaccacaagattatgatcagccgcgtcaacgagctggcccagattctcggggaagttgcaaactctgcgtcg

SEQ ID NO: 420 - protein, 255 aa, synthetic construct
  REGION 1..255: note = Description of Artificial Sequence: Synthetic polypeptide
MSAHFILIHSICHGAWLWYKLRPLLQGWGHTVTAIDLVASGSNPHQLEEIGTWGQYSEPLFTLIESIPEGKKVILVGEAGGGINIALAAEKYPEKVSALVFVNGLMPDISHSPAFVVKKYSEVFTDWKDSIFSNYTYGNDTVTAVKLGDRLLENIFSMSPIEDVELAKRRVRKGSFFLQDLDRLPNFTSEGYGSSRRVYVYGEEDQVFSRDFQLWQINNYKPDKVYCVPGGDHKIMISRVNELAQILGEVANSAS

SEQ ID NO: 421 - DNA, 765 bp, synthetic construct
  misc_feature 1..765: note = Description of Artificial Sequence: Synthetic polynucleotide
  source 1..765: mol_type = other DNA
atgagtgcgcattttattctgatccacagtatctgccatggcgcctggctgtggtataaactgggtccgttattacagagcgccggtcataccgttacggcgattgatcttgtcgctagcgggagtaatcctcaccaactggaagaaattggcacatggggtcagtactcagaaccattgttcaccctgatcgaatcgattccggaaggtaagaaagtcattctggtaggagaagcggggggcggcatcaatattgcactggccgcggagaaatatccggagaaagtgagcgctctcgtctttgtgaacggtcttatgcccgatatctcgcacagcccagcgttcgtggtaaagaaatatagcgaagttttcactgactggaaagattcgatcttcagcaattatacctacggtaacgacacggtcaccgcggttaagttgggagatcgtctgctggagaatatcttctccatgtctccgattgaagatgtagaactggcgaaacgccgtgtccgcaaaggctccttttttctgcaagacttggatcgcctgccgaactttacgtcggaagggtatggtagtagccgtcgtgtgtatgtttacggcgaagaagaccaggtctttagccgcgattttcagttatggcaaattaataattataagcctgataaagtgtactgtgtaccgggtggtgaccacaagattatgatcagccgcgtcaacgagctggcccagattctcggggaagttgcaaactctgcgtcg

SEQ ID NO: 422 - protein, 255 aa, synthetic construct
  REGION 1..255: note = Description of Artificial Sequence: Synthetic polypeptide
MSAHFILIHSICHGAWLWYKLGPLLQSAGHTVTAIDLVASGSNPHQLEEIGTWGQYSEPLFTLIESIPEGKKVILVGEAGGGINIALAAEKYPEKVSALVFVNGLMPDISHSPAFVVKKYSEVFTDWKDSIFSNYTYGNDTVTAVKLGDRLLENIFSMSPIEDVELAKRRVRKGSFFLQDLDRLPNFTSEGYGSSRRVYVYGEEDQVFSRDFQLWQINNYKPDKVYCVPGGDHKIMISRVNELAQILGEVANSAS

SEQ ID NO: 423 - DNA, 765 bp, synthetic construct
  misc_feature 1..765: note = Description of Artificial Sequence: Synthetic polynucleotide
  source 1..765: mol_type = other DNA
atgagtgcgcattttattctgatccacagtatctgccatggcgcctggatttggtataaactgattccgttattacagagcgccggtcataccgttacggcgattgatcttgtcgctagcgggagtaatcctcaccaactggaagaaattggcacatggggtcagtactcagaaccattgttcaccgccatcgaatcgattccggaaggtaagaaagtcattctggtaggagaagcggggggcggcatcaatattgcactggccgcggagaaatatccggagaaagtgagcgctctcgtctttgtgaacggtcttatgcccgatatctcgcacggcccagcgttcgtggtaaagaaatatagcgaagttttcactgactggaaagattcgatcttcagcaattatacctacggtaacgacacggtcaccgcggttaagttgggagatcgtctgctggagaatatcttctccatgtctccgattgaagatgtagaactggcgaaacatcgtgtccgcaaaggctccttttttctgcaagacttggatcgcctgccgaactttacgtcggaagggtatggtggtattcgtcgtgtgtatgtttgcggcgaagaagaccaggtttttagccgcgattttcagttatggcaaattaataattataagcctgataaagtgctgtgtgtaccgggtggtgaccacaagattatgatcagccgcgtcaacgagctggcccagattctcggggaagttgcaaactctgcgtcg

SEQ ID NO: 424 - protein, 255 aa, synthetic construct
  REGION 1..255: note = Description of Artificial Sequence: Synthetic polypeptide
MSAHFILIHSICHGAWIWYKLIPLLQSAGHTVTAIDLVASGSNPHQLEEIGTWGQYSEPLFTAIESIPEGKKVILVGEAGGGINIALAAEKYPEKVSALVFVNGLMPDISHGPAFVVKKYSEVFTDWKDSIFSNYTYGNDTVTAVKLGDRLLENIFSMSPIEDVELAKHRVRKGSFFLQDLDRLPNFTSEGYGGIRRVYVCGEEDQVFSRDFQLWQINNYKPDKVLCVPGGDHKIMISRVNELAQILGEVANSAS

SEQ ID NO: 425 - DNA, 765 bp, synthetic construct
  misc_feature 1..765: note = Description of Artificial Sequence: Synthetic polynucleotide
  source 1..765: mol_type = other DNA
atgagtgcgcattttattctgatccacagtatctgccatggcgcctggatttggtataaactgattccgttattacagagcgccggtcataccgttacggcgattgatcttgtcgctagcgggagtaatcctcaccaactggaagaaattggcacatggggtcagtactcagaaccattgttcacccagatcgaatcgattccggaaggtaagaaagtcattctggtaggagaagcggggggcggcatcaatattgcactggccgcggagaaatatccggagaaagtgagcgctctcgtctttgtgaacggtcttatgcccgatatctcgcacggcccagcgttcgtggtaaagaaatatagcgaagttttcactgactggaaagattcgatcttcagcaattatacctacggtaacgacacggtcaccgcggttaaattgggagatcgtctgctggagaatatcttctccatgtctccgattgaagatgtagaactggcgaaacaccgtgtccgcaaaggctccttttttctgcaagacttggatcgcctgccgaactttacgtcggaagggtatggtggtattcgtcgtgtgtatgtttacggcgaagaagaccaggtttttagccgcgattttcagttatggcaaattaataattataagcctgataaagtgtactgtgtaccgggtggtgaccacaagattatgatcagccgcgtcaacgagctggcccagattctcggggaagttgcaaactctgcgtcg

SEQ ID NO: 426 - protein, 255 aa, synthetic construct
  REGION 1..255: note = Description of Artificial Sequence: Synthetic polypeptide
MSAHFILIHSICHGAWIWYKLIPLLQSAGHTVTAIDLVASGSNPHQLEEIGTWGQYSEPLFTQIESIPEGKKVILVGEAGGGINIALAAEKYPEKVSALVFVNGLMPDISHGPAFVVKKYSEVFTDWKDSIFSNYTYGNDTVTAVKLGDRLLENIFSMSPIEDVELAKHRVRKGSFFLQDLDRLPNFTSEGYGGIRRVYVYGEEDQVFSRDFQLWQINNYKPDKVYCVPGGDHKIMISRVNELAQILGEVANSAS

SEQ ID NO: 427 - DNA, 765 bp, synthetic construct
  misc_feature 1..765: note = Description of Artificial Sequence: Synthetic polynucleotide
  source 1..765: mol_type = other DNA
atgagtgcgcattttattctgatccacagtatctgccatggcgcctggatttggtataaactgattccgttattacagggcgccggtcataccgttacggcgattgatcttgtcgctagcgggagtaatcctcaccaactggaagaaattggcacatggggtcagtactcagaaccattgttcacccagatcgaatcgattccggaaggtaagaaagtcattctggtaggagaagcggggggcggcatcaatattgcactggccgcggagaaatatccggagaaagtgagcgctctcgtctttgtgaacggtcttatgcccgatatctcgcacagcccagcgttcgtggtaaagaaatatagcgaagttttcactgactggaaagattcgatcttcagcaattatacctacggtaacgacacggtcaccgcggttgagttgggagatcgtctgctggagaatatcttctccatgtctccgattgaagatgtagaactggcgaaacgccgtgtccgcaaaggctccttttttctgcaagacttggatcgcctgccgaactttacgtcggaagggtatggtggtattcgtcgtgtgtatgtttgcggcgaagaagaccaggtttttagccgcgattttcagttatggcaaattaataattataagcctgataaagtgtactgtgtaccgggtggtgaccacaagattatgatcagccgcgtcaacgagctggcccagattctcggggaagttgcaaactctgcgtcg

SEQ ID NO: 428 - protein, 255 aa, synthetic construct
  REGION 1..255: note = Description of Artificial Sequence: Synthetic polypeptide
MSAHFILIHSICHGAWIWYKLIPLLQGAGHTVTAIDLVASGSNPHQLEEIGTWGQYSEPLFTQIESIPEGKKVILVGEAGGGINIALAAEKYPEKVSALVFVNGLMPDISHSPAFVVKKYSEVFTDWKDSIFSNYTYGNDTVTAVELGDRLLENIFSMSPIEDVELAKRRVRKGSFFLQDLDRLPNFTSEGYGGIRRVYVCGEEDQVFSRDFQLWQINNYKPDKVYCVPGGDHKIMISRVNELAQILGEVANSAS

SEQ ID NO: 429 - DNA, 765 bp, synthetic construct
  misc_feature 1..765: note = Description of Artificial Sequence: Synthetic polynucleotide
  source 1..765: mol_type = other DNA
atgagtgcgcattttattctgatccacagtatctgccatggcgcctggatttggtataaactgattccgttattacagggctggggtcataccgttacggcgattgatcttgtcgctagcgggagtaatcctcaccaactggaagaaattggcacatggggtcagtactcagaaccattgttcaccgccatcgaatcgattccggaaggtaagaaagtcattctggtaggagaagcggggggcggcatcaatattgcactggccgcggagaaatatccggagaaagtgagcgctctcgtctttgtgaacggtcttatgcccgatatctcgcacggcccagcgttcgtggtaaagaaatatagcgaagttttcactgactggaaagattcgatcttcagcaattatacctacggtaacgacacggtcaccgcggttaagttgggagatcgtctgctggagaatatcttctccatgtctccgattgaagatgtagaactggcgaaacaccgtgtccgcaaaggctccttttttctgcaagacttggatcgcctgccgaactttacgtcggaagggtatggtggtagccgtcgtgtgtatgtttacggcgaagaagaccaggtttttagccgcgattttcagttatggcaaattaataattataagcctgataaagtgtactgtgtaccgggtggtgaccacaagattatgatcagccgcgtcaacgagctggcccagattctccaggaagttgcaaactctgcgtcg

SEQ ID NO: 430 - protein, 255 aa, synthetic construct
  REGION 1..255: note = Description of Artificial Sequence: Synthetic polypeptide
MSAHFILIHSICHGAWIWYKLIPLLQGWGHTVTAIDLVASGSNPHQLEEIGTWGQYSEPLFTAIESIPEGKKVILVGEAGGGINIALAAEKYPEKVSALVFVNGLMPDISHGPAFVVKKYSEVFTDWKDSIFSNYTYGNDTVTAVKLGDRLLENIFSMSPIEDVELAKHRVRKGSFFLQDLDRLPNFTSEGYGGSRRVYVYGEEDQVFSRDFQLWQINNYKPDKVYCVPGGDHKIMISRVNELAQILQEVANSAS

SEQ ID NO: 431 - DNA, 765 bp, synthetic construct
  misc_feature 1..765: note = Description of Artificial Sequence: Synthetic polynucleotide
  source 1..765: mol_type = other DNA
atgagtgcgcattttattctgatccacagtatctgccatggcgcctggctgtggtataaactggggccgttattacagtctgcaggtcataccgttacggcgattgatcttgtcgctagcgggagtaatcctcaccaactggaagagattggcacatggggccagtactcagaaccattgttcaccctgatcgaatcgattccggaaggtaagaaagtcattctggtaggagaagcggggggcggcatcaatattgcactggccgcggagaaatatccggagaaagtgagcgctctcgtctttgtgaacggtcttatgcccgatatctcgcacggcccagcgttcgtggtaaagaaatatagcgaagttttcactgactggaaagattcgatcttcagcaattatacctacggtaacgacacggtcaccgcggttaaattgggagatcgtacgctggagaatatcttctccaactctccgattgaagatgtagaactggcgaaacgtcgtgtccgcaaaggctccttttttctgcaagacttggatcgtctgccgaactttacgtcggaagggtatggtggcattcgtcgtgtgtatgtttacggcgaagaagaccagacttttagccgcgattttcagttatggcaaattaataattataagcctgataaagtgtactgtgtaccgggtggtgaccacaagattatgatcagccgcgtcaacgagctggcccagattctcggggaagttgcaaactctgcgtcg

SEQ ID NO: 432 - protein, 255 aa, synthetic construct
  REGION 1..255: note = Description of Artificial Sequence: Synthetic polypeptide
MSAHFILIHSICHGAWLWYKLGPLLQSAGHTVTAIDLVASGSNPHQLEEIGTWGQYSEPLFTLIESIPEGKKVILVGEAGGGINIALAAEKYPEKVSALVFVNGLMPDISHGPAFVVKKYSEVFTDWKDSIFSNYTYGNDTVTAVKLGDRTLENIFSNSPIEDVELAKRRVRKGSFFLQDLDRLPNFTSEGYGGIRRVYVYGEEDQTFSRDFQLWQINNYKPDKVYCVPGGDHKIMISRVNELAQILGEVANSAS

SEQ ID NO: 433 - DNA, 765 bp, synthetic construct
  misc_feature 1..765: note = Description of Artificial Sequence: Synthetic polynucleotide
  source 1..765: mol_type = other DNA
atgagtgcgcattttattctgatccacagtatctgccatggcgcctggctgtggtataaactgatcccgttattacagtctgcaggtcataccgttacggcgattgatcttttcgctagcgggagtaatcctcaccaactggaagaaattggcacatggggtcagtactcagaaccattgttcaccctgatcgaatcgattccggaaggtaagaaagtcattctggtaggagaagcggggggcggcatcaatattgcactggccgcggagaaatatccggagaaagtgagcgctctcgtctttgtgaacggtcttatgcccgatatcgatcacagcccagcgttcgtggtaaagaaatatagcgaagttttcactgacgcaaaagattcgatcttcagcaattatacctacggtaacgacacggtcaccgcggttgaattgggagatcgtacgctggagaatatcttctccatgtctccgattgaagatgtagaactggcgaaacatcgtgtccgcaaaggctccttttttctgcaagacttggatcgtctgccgaactttacgtcggaagggtatggtggtattcgtcgtgtgtatgtttacggcgaagaagaccagacttttagccgcgattttcagttatggcaaattaataattataagcctgataaagtgtactgtgtaccgggtggtgaccacaagattatgatcagccgcgtcaacgagctggcccagattctcggggaagttgcaaactctgcgtcg

SEQ ID NO: 434 - protein, 255 aa, synthetic construct
  REGION 1..255: note = Description of Artificial Sequence: Synthetic polypeptide
MSAHFILIHSICHGAWLWYKLIPLLQSAGHTVTAIDLFASGSNPHQLEEIGTWGQYSEPLFTLIESIPEGKKVILVGEAGGGINIALAAEKYPEKVSALVFVNGLMPDIDHSPAFVVKKYSEVFTDAKDSIFSNYTYGNDTVTAVELGDRTLENIFSMSPIEDVELAKHRVRKGSFFLQDLDRLPNFTSEGYGGIRRVYVYGEEDQTFSRDFQLWQINNYKPDKVYCVPGGDHKIMISRVNELAQILGEVANSAS

SEQ ID NO: 435 - DNA, 765 bp, synthetic construct
  misc_feature 1..765: note = Description of Artificial Sequence: Synthetic polynucleotide
  source 1..765: mol_type = other DNA
atgagtgcgcattttattctgatccacagtatctgccatggcgcctggctgtggtataaactgatcccgttattacagtctgcaggtcataccgttacggcgattgatcttgtcgctagcgggagtaatcctcaccaactggaagaaattggcacatggggtcagtactcagaaccattgttcaccctgatcgaatcgattccggaaggtaagaaagtcattctggtaggagaagcggggggcggcatcaatattgcactggccgcggagaaatatccggagaaagtgagcgctctcgtctttgtgaacggtcttatgcccgatatctcgcacagtccagcgttcgtggtaaagaaatatagcgaagttttcactgactggaaagattcgatcttcagcaattatacctacggtaacgacacggtcaccgcggttaaattgggagatcgtctgctggagaatatcttctccatgtctccgattgaagatgtagaactggcgaaacatcgtgtccgcaaaggctccttttttctgcaagacttgcagcgcctgccgaactttacgtcggaagggtatggtggtattcgtcgtgtgtatgtttacggcgaagaagaccaggtttttagccgcgattttcagttatggcaaattaataattataagcctgataaagtgtactgtgtaccgggtggtgaccacaagattatgatcagccgcgtcaacgagctggcccagattctcggggaagttgcaaactctgcgtcg

SEQ ID NO: 436 - protein, 255 aa, synthetic construct
  REGION 1..255: note = Description of Artificial Sequence: Synthetic polypeptide
MSAHFILIHSICHGAWLWYKLIPLLQSAGHTVTAIDLVASGSNPHQLEEIGTWGQYSEPLFTLIESIPEGKKVILVGEAGGGINIALAAEKYPEKVSALVFVNGLMPDISHSPAFVVKKYSEVFTDWKDSIFSNYTYGNDTVTAVKLGDRLLENIFSMSPIEDVELAKHRVRKGSFFLQDLQRLPNFTSEGYGGIRRVYVYGEEDQVFSRDFQLWQINNYKPDKVYCVPGGDHKIMISRVNELAQILGEVANSAS

SEQ ID NO: 437 - DNA, 765 bp, synthetic construct
  misc_feature 1..765: note = Description of Artificial Sequence: Synthetic polynucleotide
  source 1..765: mol_type = other DNA
atgagtgcgcattttattctgatccacagtatctgccatggcgcctggctgtggtataaactgatcccgttattacagtctgcaggtcataccgttacggcgattgatcttgtcgctagcgggagtaatcctcaccaactggaagaaattggcacatggggtcagtactcagaaccattgttcaccctgatcgaatcgattccggaaggtaagaaagtcattctggtaggagaagcggggggcggcatcaatattgcactggccgcggagaaatatccggagaaagtgagcgctctcgtctttgtgaacggtcttatgcccgatatctcgcacagtccagcgttcgtggtaaagaaatatagcgaagttttcactgactggaaagattcgatcttcagcaattatacctacggtaacgacacggtcaccgcggttaaattgggagatcgtctgctggagaatatcttctccatgtctccgattgaagatgtagaactggcgaaacatcgtgtccgcaaaggctccttttttctgcaagacttggatcgcctgccgaactttacgtcggaagggtatggtggtattcgtcgtgtgtatgtttacggcgaagaagaccaggtttttagccgcgattttcagttatggcaaattaataattataagcctgataaagtgtactgtgtaccgggtggtgaccacaagattatgatcagccgcgtcaacgagctggcccagattctcggggaagttgcaaactctgcgatg

SEQ ID NO: 438 - protein, 255 aa, synthetic construct
  REGION 1..255: note = Description of Artificial Sequence: Synthetic polypeptide
MSAHFILIHSICHGAWLWYKLIPLLQSAGHTVTAIDLVASGSNPHQLEEIGTWGQYSEPLFTLIESIPEGKKVILVGEAGGGINIALAAEKYPEKVSALVFVNGLMPDISHSPAFVVKKYSEVFTDWKDSIFSNYTYGNDTVTAVKLGDRLLENIFSMSPIEDVELAKHRVRKGSFFLQDLDRLPNFTSEGYGGIRRVYVYGEEDQVFSRDFQLWQINNYKPDKVYCVPGGDHKIMISRVNELAQILGEVANSAM

SEQ ID NO: 439 - DNA, 765 bp, synthetic construct
  misc_feature 1..765: note = Description of Artificial Sequence: Synthetic polynucleotide
  source 1..765: mol_type = other DNA
atgagtgcgcattttattctgatccacagtatctgccatggcgcctggctgtggtataaactgatcccgttattacagtctgcaggtcataccgttacggcgattgatcttgtcgctagcgggagtaatcctcaccaactggaagaaattggcacatggggtcagtactcagaaccattgttcaccctgatcgaatcgattccggaaggtaagaaagtcattctggtaggagaagcggggggcggcatcaatattgcactggccgcggagaaatatccggagaaagtgagcgctctcgtctttgtgaacggtcttatgcccgatatctcgcacagtccagcgttcgtggtaaaggggtatagcgaagttttcactgactggaaagattcgatcttcagcaattatacctacggtaacgacacggtcaccgcggttaaattgggagatcgtctgctggagaatatcttctccatgtctccgattgaagatgtagaactggcgaaacatcgtgtccgcaaaggctccttttttctgcaagacttggatcgcctgccgaactttacgtcggaagggtatggtggtattcgtcgtgtgtatgtttacggcgaagaagaccaggtttttagccgcgattttcagttatggcaaattaataattataagcctgataaagtgtactgtgtaccgggtggtgaccacaagattatgatcagccgcgtcaacgagctggcccagattctcggggaagttgcaaactctgcgtcg

SEQ ID NO: 440 - protein, 255 aa, synthetic construct
  REGION 1..255: note = Description of Artificial Sequence: Synthetic polypeptide
MSAHFILIHSICHGAWLWYKLIPLLQSAGHTVTAIDLVASGSNPHQLEEIGTWGQYSEPLFTLIESIPEGKKVILVGEAGGGINIALAAEKYPEKVSALVFVNGLMPDISHSPAFVVKGYSEVFTDWKDSIFSNYTYGNDTVTAVKLGDRLLENIFSMSPIEDVELAKHRVRKGSFFLQDLDRLPNFTSEGYGGIRRVYVYGEEDQVFSRDFQLWQINNYKPDKVYCVPGGDHKIMISRVNELAQILGEVANSAS

SEQ ID NO: 441 - DNA, 765 bp, synthetic construct
  misc_feature 1..765: note = Description of Artificial Sequence: Synthetic polynucleotide
  source 1..765: mol_type = other DNA
atgagtgcgcattttattctgatccacagtatctgccatggcgcctggctgtggtataaactgatcccgttattacagtctgcaggtcataccgttacggcgattgatcttgtcgctagcgggagtaatcctcaccaactggaagaaattggcacatggggtcagtactcagaaccattgttcaccctgatcgaatcgattccggaaggtaagaaagtcattctggtaggagaagcggggggcggcatcaatattgcactggccgcggagaaatatccggagaaagtgagcgctctcgtctttgtgaacggtcttatgcccgatatctcgcacagtccagcgttcgtggtaaagaaatatagcgaagttttcactgactggaaagattcgatcttcagcaattatacctacggtaacgacacggtcgtggcggttaaattgggagatcgtctgctggagaatatcttctccatgtctccgattgaagatgtagaactggcgaaacatcgtgtccgcaaaggctccttttttctgcaagacttggatcgcctgccgaactttacgtcggaagggtatggtggtattcgtcgtgtgtatgtttacggcgaagaagaccaggtttttagccgcgattttcagttatggcaaattaataattataagcctgataaagtgtactgtgtaccgggtggtgaccacaagattatgatcagccgcgtcaacgagctggcccagattctcggggaagttgcaaactctgcgtcg

SEQ ID NO: 442 - protein, 255 aa, synthetic construct
  REGION 1..255: note = Description of Artificial Sequence: Synthetic polypeptide
MSAHFILIHSICHGAWLWYKLIPLLQSAGHTVTAIDLVASGSNPHQLEEIGTWGQYSEPLFTLIESIPEGKKVILVGEAGGGINIALAAEKYPEKVSALVFVNGLMPDISHSPAFVVKKYSEVFTDWKDSIFSNYTYGNDTVVAVKLGDRLLENIFSMSPIEDVELAKHRVRKGSFFLQDLDRLPNFTSEGYGGIRRVYVYGEEDQVFSRDFQLWQINNYKPDKVYCVPGGDHKIMISRVNELAQILGEVANSAS

SEQ ID NO: 443 - DNA, 765 bp, synthetic construct
  misc_feature 1..765: note = Description of Artificial Sequence: Synthetic polynucleotide
  source 1..765: mol_type = other DNA
atgagtgcgcattttattctgatccacagtatctgccatggcgcctggctgtggtataaactgatcccgttattacagtctgcaggtcataccgttacggcgattgatcttgtcgctagcgggagtaatcctcaccaactggaagaaattggcacatggggtcagtactcagaaccattgttcaccctgatcgaatcgattccggaaggtaagaaagtcattctggtaggagaagcggggggcggcatcaatattgcactggccgcggagaaatatccggagaaagtgagcgctctcgtctttgtgaacggtcttatgcccgatatctcgcacagtccagcgttcgtggtaaagaaatatagcgaagttttcactgactggaaagattcgatcttcagcaattatacctacggtaacgacacggtcaccgcggttaaattgggagatcgtctgctggagggtatcttctccatgtctccgattgaagatgtagaactggcgaaacatcgtgtccgcaaaggctccttttttctgcaagacttggatcgcctgccgaactttacgtcggaagggtatggtggtattcgtcgtgtgtatgtttacggcgaagaagaccaggtttttagccgcgattttcagttatggcaaattaataattataagcctgataaagtgtactgtgtaccgggtggtgaccacaagattatgatcagccgcgtcaacgagctggcccagattctcggggaagttgcaaactctgcgtcg

SEQ ID NO: 444 - protein, 255 aa, synthetic construct
  REGION 1..255: note = Description of Artificial Sequence: Synthetic polypeptide
MSAHFILIHSICHGAWLWYKLIPLLQSAGHTVTAIDLVASGSNPHQLEEIGTWGQYSEPLFTLIESIPEGKKVILVGEAGGGINIALAAEKYPEKVSALVFVNGLMPDISHSPAFVVKKYSEVFTDWKDSIFSNYTYGNDTVTAVKLGDRLLEGIFSMSPIEDVELAKHRVRKGSFFLQDLDRLPNFTSEGYGGIRRVYVYGEEDQVFSRDFQLWQINNYKPDKVYCVPGGDHKIMISRVNELAQILGEVANSAS

SEQ ID NO: 445 - DNA, 765 bp, synthetic construct
  misc_feature 1..765: note = Description of Artificial Sequence: Synthetic polynucleotide
  source 1..765: mol_type = other DNA
atgagtgcgcattttattctgatccacagtatctgccatggcgcctggctgtggtataaactgatcccgttattacagtctgcaggtcataccgttacggcgattgatcttgtcgctagcgggagtaatcctcaccaactggaagaaattggcacatggggtcagtactcagaaccattgttcaccctgatcgaatcgattccggaaggtaagaaagtcattctggtaggagaagcggggggcggcatcaatattgcactggccgcggagaaatatccggagaaagtgagcgctctcgtctttgtgaacggtcttatgcccgatatctcgcacagtccagcgttcgtggtaaagaaatatagcgaagttttcactgactggaaagattcgatcttcagcttttatacctacggtaacgacacggtcaccgcggttaaattgggagatcgtctgctggagaatatcttctccatgtctccgattgaagatgtagaactggcgaaacatcgtgtccgcaaaggctccttttttctgcaagacttggatcgcctgccgaactttacgtcggaagggtatggtggtattcgtcgtgtgtatgtttacggcgaagaagaccaggtttttagccgcgattttcagttatggcaaattaataattataagcctgataaagtgtactgtgtaccgggtggtgaccacaagattatgatcagccgcgtcaacgagctggcccagattctcggggaagttgcaaactctgcgtcg

SEQ ID NO: 446 - protein, 255 aa, synthetic construct
  REGION 1..255: note = Description of Artificial Sequence: Synthetic polypeptide
MSAHFILIHSICHGAWLWYKLIPLLQSAGHTVTAIDLVASGSNPHQLEEIGTWGQYSEPLFTLIESIPEGKKVILVGEAGGGINIALAAEKYPEKVSALVFVNGLMPDISHSPAFVVKKYSEVFTDWKDSIFSFYTYGNDTVTAVKLGDRLLENIFSMSPIEDVELAKHRVRKGSFFLQDLDRLPNFTSEGYGGIRRVYVYGEEDQVFSRDFQLWQINNYKPDKVYCVPGGDHKIMISRVNELAQILGEVANSAS

SEQ ID NO: 447 - DNA, 765 bp, synthetic construct
  misc_feature 1..765: note = Description of Artificial Sequence: Synthetic polynucleotide
  source 1..765: mol_type = other DNA
atgagtgcgcattttattctgatccacagtatctgccatggcgcctggctgtggtataaactgatcccgttattacagtctgcaggtcataccgttacggcgattgatcttgtcgctagcgggagtaatcctcaccaactggaagaaattggcacatggggtcagtactcagaaccattgttcaccctgatcgaatcgattccggaaggtaagaaagtcattctggtaggagaagcggggggcggcatcaatattgcactggccgcggagaaatatccggagaaagtgagcgctctcgtctttgtgaacggtcttatgcccgatatctcgcacagtccagcgttcgtggtaaagaaatatagcgaagttttcactgactggaaagattcgatcttcagcaattatacctacggtaacgacacggtcaccgcggttaaattgggaactcgtctgctggagaatatcttctccatgtctccgattgaagatgtagaactggcgaaacatcgtgtccgcaaaggctccttttttctgcaagacttggatcgcctgccgaactttacgtcggaagggtatggtggtattcgtcgtgtgtatgtttacggcgaagaagaccaggtttttagccgcgattttcagttatggcaaattaataattataagcctgataaagtgtactgtgtaccgggtggtgaccacaagattatgatcagccgcgtcaacgagctggcccagattctcggggaagttgcaaactctgcgtcg

SEQ ID NO: 448 - protein, 255 aa, synthetic construct
  REGION 1..255: note = Description of Artificial Sequence: Synthetic polypeptide
MSAHFILIHSICHGAWLWYKLIPLLQSAGHTVTAIDLVASGSNPHQLEEIGTWGQYSEPLFTLIESIPEGKKVILVGEAGGGINIALAAEKYPEKVSALVFVNGLMPDISHSPAFVVKKYSEVFTDWKDSIFSNYTYGNDTVTAVKLGTRLLENIFSMSPIEDVELAKHRVRKGSFFLQDLDRLPNFTSEGYGGIRRVYVYGEEDQVFSRDFQLWQINNYKPDKVYCVPGGDHKIMISRVNELAQILGEVANSAS

SEQ ID NO: 449 - DNA, 765 bp, synthetic construct
  misc_feature 1..765: note = Description of Artificial Sequence: Synthetic polynucleotide
  source 1..765: mol_type = other DNA
atgagtgcgcattttattctgatccacagtatctgccatggcgcctggctgtggtataaactgatcccgttattacagtctgcaggtcataccgttacggcgattgatcttgtcgctagcgggagtaatcctcaccaactggaagaaattggcacatggggtcagtactcagaaccattgttcaccctgatcgaatcgattccggaaggtaagaaagtcattctggtaggagaagcggggggcggcatcaatattgcactggccgcggagaaatatccggagaaagtgagcgctctcgtctttgtgaacggtcttatgcccgatatctcgcacagtccagcgttcgtggtaaagaaatatagcgaaacgttcactgactggaaagattcgatcttcagcaattatacctacggtaacgacacggtcaccgcggttaaattgggagatcgtctgctggagaatatcttctccatgtctccgattgaagatgtagaactggcgaaacatcgtgtccgcaaaggctccttttttctgcaagacttggatcgcctgccgaactttacgtcggaagggtatggtggtattcgtcgtgtgtatgtttacggcgaagaagaccaggtttttagccgcgattttcagttatggcaaattaataattataagcctgataaagtgtactgtgtaccgggtggtgaccacaagattatgatcagccgcgtcaacgagctggcccagattctcggggaagttgcaaactctgcgtcg

SEQ ID NO: 450 - protein, 255 aa, synthetic construct
  REGION 1..255: note = Description of Artificial Sequence: Synthetic polypeptide
MSAHFILIHSICHGAWLWYKLIPLLQSAGHTVTAIDLVASGSNPHQLEEIGTWGQYSEPLFTLIESIPEGKKVILVGEAGGGINIALAAEKYPEKVSALVFVNGLMPDISHSPAFVVKKYSETFTDWKDSIFSNYTYGNDTVTAVKLGDRLLENIFSMSPIEDVELAKHRVRKGSFFLQDLDRLPNFTSEGYGGIRRVYVYGEEDQVFSRDFQLWQINNYKPDKVYCVPGGDHKIMISRVNELAQILGEVANSAS

SEQ ID NO: 451 - DNA, 765 bp, synthetic construct
  misc_feature 1..765: note = Description of Artificial Sequence: Synthetic polynucleotide
  source 1..765: mol_type = other DNA
atgagtgcgcattttattctgatccacagtatctgccatggcgcctggctgtggtataaactgatcccgttattacagtctgcaggtcataccgttacggcgattgatcttgtcgctagcgggagtaatcctcaccaactggaagaaattggcacatggggtcagtactcagaaccattgttcaccctgatcgaatcgattccggaaggtaagaaagtcattctggtaggagaagcggggggcggcatcaatattgcactggccgcggagaaatatccggagaaagtgagcgctctcgtctttgtgaacggtcttatgcccgatatctcgcacagtccagcgttcgtggtaaagaaatatagcgaagttttcactgactggaaagattcgatcttcagcaattatacctacggtaacgacacggtcaccgcggttaaattgggagatcgtctgctggagaatatcttctccatgtctccgattgaagatgtagaactggcgaaacatcgtgtccgcaaaggctccttttttctgcaagacttgtggcgcctgccgaactttacgtcggaagggtatggtggtattcgtcgtgtgtatgtttacggcgaagaagaccaggtttttagccgcgattttcagttatggcaaattaataattataagcctgataaagtgtactgtgtaccgggtggtgaccacaagattatgatcagccgcgtcaacgagctggcccagattctcggggaagttgcaaactctgcgtcg

SEQ ID NO: 452 - protein, 255 aa, synthetic construct
  REGION 1..255: note = Description of Artificial Sequence: Synthetic polypeptide
MSAHFILIHSICHGAWLWYKLIPLLQSAGHTVTAIDLVASGSNPHQLEEIGTWGQYSEPLFTLIESIPEGKKVILVGEAGGGINIALAAEKYPEKVSALVFVNGLMPDISHSPAFVVKKYSEVFTDWKDSIFSNYTYGNDTVTAVKLGDRLLENIFSMSPIEDVELAKHRVRKGSFFLQDLWRLPNFTSEGYGGIRRVYVYGEEDQVFSRDFQLWQINNYKPDKVYCVPGGDHKIMISRVNELAQILGEVANSAS

SEQ ID NO: 453 - DNA, 765 bp, synthetic construct
  misc_feature 1..765: note = Description of Artificial Sequence: Synthetic polynucleotide
  source 1..765: mol_type = other DNA
atgagtgcgcattttattctgatccacagtatctgccatggcgcctggctgtggtataaactgatcccgttattacagtctgcaggtcataccgttacggcgattgatcttgtcgctagcgggagtaatcctcaccaactggaagaaattggcacatggggtcagtactcagaaccattgttcaccctgatcgaatcgattccggaaggtaagaaagtcattctggtaggagaagcggggggcggcatcaatattgcactggccgcggagaaatatccggagaaagtgagcgctctcgtctttgtgaacggtcttatgcccgatatctcgcacagtccagcgttcgtggtaaagaaatatagcgaagttttcactgactggaaagattcgatcttcagcaattatacctacggtaacgacacggtcaccgcggttaaattgggagatcgtctgctggagagtatcttctccatgtctccgattgaagatgtagaactggcgaaacatcgtgtccgcaaaggctccttttttctgcaagacttggatcgcctgccgaactttacgtcggaagggtatggtggtattcgtcgtgtgtatgtttacggcgaagaagaccaggtttttagccgcgattttcagttatggcaaattaataattataagcctgataaagtgtactgtgtaccgggtggtgaccacaagattatgatcagccgcgtcaacgagctggcccagattctcggggaagttgcaaactctgcgtcg

SEQ ID NO: 454 - protein, 255 aa, synthetic construct
  REGION 1..255: note = Description of Artificial Sequence: Synthetic polypeptide
MSAHFILIHSICHGAWLWYKLIPLLQSAGHTVTAIDLVASGSNPHQLEEIGTWGQYSEPLFTLIESIPEGKKVILVGEAGGGINIALAAEKYPEKVSALVFVNGLMPDISHSPAFVVKKYSEVFTDWKDSIFSNYTYGNDTVTAVKLGDRLLESIFSMSPIEDVELAKHRVRKGSFFLQDLDRLPNFTSEGYGGIRRVYVYGEEDQVFSRDFQLWQINNYKPDKVYCVPGGDHKIMISRVNELAQILGEVANSAS

SEQ ID NO: 455 - DNA, 765 bp, synthetic construct
  misc_feature 1..765: note = Description of Artificial Sequence: Synthetic polynucleotide
  source 1..765: mol_type = other DNA
atgagtgcgcattttattctgatccacagtatctgccatggcgcctggctgtggtataaactgatcccgttattacagtctgcaggtcataccgttacggcgattgatcttgtcgctagcgggagtaatcctcaccaactggaagaaattggcacatggggtcagtactcagaaccattgttcaccctgatcgaatcgattccggaaggtaagaaagtcattctggtaggagaagcggggggcggcatcaatattgcactggccgcggagaaatatccggagaaagtgagcgctctcgtctttgtgaacggtcttatgcccgatatctcgcacagtccagcgttcgtggtaaagaaatatagcgaagttttcactgactggaaagattcgatcttcagcaattatacctacggtaacgacacggtcaccgcggttaaattgggagtgcgtctgctggagaatatcttctccatgtctccgattgaagatgtagaactggcgaaacatcgtgtccgcaaaggctccttttttctgcaagacttggatcgcctgccgaactttacgtcggaagggtatggtggtattcgtcgtgtgtatgtttacggcgaagaagaccaggtttttagccgcgattttcagttatggcaaattaataattataagcctgataaagtgtactgtgtaccgggtggtgaccacaagattatgatcagccgcgtcaacgagctggcccagattctcggggaagttgcaaactctgcgtcg

SEQ ID NO: 456 - protein, 255 aa, synthetic construct
  REGION 1..255: note = Description of Artificial Sequence: Synthetic polypeptide
MSAHFILIHSICHGAWLWYKLIPLLQSAGHTVTAIDLVASGSNPHQLEEIGTWGQYSEPLFTLIESIPEGKKVILVGEAGGGINIALAAEKYPEKVSALVFVNGLMPDISHSPAFVVKKYSEVFTDWKDSIFSNYTYGNDTVTAVKLGVRLLENIFSMSPIEDVELAKHRVRKGSFFLQDLDRLPNFTSEGYGGIRRVYVYGEEDQVFSRDFQLWQINNYKPDKVYCVPGGDHKIMISRVNELAQILGEVANSAS

SEQ ID NO: 457 - DNA, 765 bp, synthetic construct
  misc_feature 1..765: note = Description of Artificial Sequence: Synthetic polynucleotide
  source 1..765: mol_type = other DNA
atgagtgcgcattttattctgatccacagtatctgccatggcgcctggctgtggtataaactgatcccgttattacagtctgcaggtcataccgttacggcgattgatcttgtcgctagcgggagtaatcctcaccaactggaagaaattggcacatggggtcagtactcagaaccattgttcaccctgatcgaatcgattccggaaggtaagaaagtcattctggtaggagaagcggggggcggcatcaatattgcactggccgcggagaaatatccggagaaagtgagcgctctcgtctttgtgaacggtcttatgcccgatatctcgcacagtccagcgttcgtggtaaagaaatatagcgaagttttcactgactggagtgattcgatcttcagcaattatacctacggtaacgacacggtcaccgcggttaaattgggagatcgtctgctggagaatatcttctccatgtctccgattgaagatgtagaactggcgaaacatcgtgtccgcaaaggctccttttttctgcaagacttggatcgcctgccgaactttacgtcggaagggtatggtggtattcgtcgtgtgtatgtttacggcgaagaagaccaggtttttagccgcgattttcagttatggcaaattaataattataagcctgataaagtgtactgtgtaccgggtggtgaccacaagattatgatcagccgcgtcaacgagctggcccagattctcggggaagttgcaaactctgcgtcg

SEQ ID NO: 458 - protein, 255 aa, synthetic construct
  REGION 1..255: note = Description of Artificial Sequence: Synthetic polypeptide
MSAHFILIHSICHGAWLWYKLIPLLQSAGHTVTAIDLVASGSNPHQLEEIGTWGQYSEPLFTLIESIPEGKKVILVGEAGGGINIALAAEKYPEKVSALVFVNGLMPDISHSPAFVVKKYSEVFTDWSDSIFSNYTYGNDTVTAVKLGDRLLENIFSMSPIEDVELAKHRVRKGSFFLQDLDRLPNFTSEGYGGIRRVYVYGEEDQVFSRDFQLWQINNYKPDKVYCVPGGDHKIMISRVNELAQILGEVANSAS

SEQ ID NO: 459 - DNA, 765 bp, synthetic construct
  misc_feature 1..765: note = Description of Artificial Sequence: Synthetic polynucleotide
  source 1..765: mol_type = other DNA
atgagtgcgcattttattctgatccacagtatctgccatggcgcctggctgtggtataaactgatcccgttattacagtctgcaggtcataccgttacggcgattgatcttgtcgctagcgggagtaatcctcaccaactggaagaaattggcacatggggtcagtactcagaaccattgttcaccctgatcgaatcgattccggaaggtaagaaagtcattctggtaggagaagcggggggcggcatcaatattgcactggccgcggagaaatatccggagaaagtgagcgctctcgtctttgtgaacggtcttatgcccgatatctcgcacagtccagcgttcgtggtaaagaaatatagcgaagttttcactgactggaaagattcgatcttcagcaattatacctacggtaacgacacggtcaccgcggttaaattgggagatcgtctgctggagaatatcttctccatgtctccgattgaagatgtagaactggcgaaacatcgtgtccgcaaaggctccttttttctgcaagacttggatcgcctgccgaactttacgtcggaagggtatggtggtattcgtcgtgtgtatgtttacggcgaagaagaccaggtttttagccgcgattttcagttatggcaaattaataattataagcctgataaagtgtactgtgtaccgggtggtgaccacaagattatgatcagccgcgtcaacgagctggcccagattctcggggaagttgcaaactctgcgaat

SEQ ID NO: 460 - protein, 255 aa, synthetic construct
  REGION 1..255: note = Description of Artificial Sequence: Synthetic polypeptide
MSAHFILIHSICHGAWLWYKLIPLLQSAGHTVTAIDLVASGSNPHQLEEIGTWGQYSEPLFTLIESIPEGKKVILVGEAGGGINIALAAEKYPEKVSALVFVNGLMPDISHSPAFVVKKYSEVFTDWKDSIFSNYTYGNDTVTAVKLGDRLLENIFSMSPIEDVELAKHRVRKGSFFLQDLDRLPNFTSEGYGGIRRVYVYGEEDQVFSRDFQLWQINNYKPDKVYCVPGGDHKIMISRVNELAQILGEVANSAN

SEQ ID NO: 461 - DNA, 765 bp, synthetic construct
  misc_feature 1..765: note = Description of Artificial Sequence: Synthetic polynucleotide
  source 1..765: mol_type = other DNA
atgagtgcgcattttattctgatccacagtatctgccatggcgcctggctgtggtataaactgatcccgttattacagtctgcaggtcataccgttacggcgattgatcttgtcgctagcgggagtaatcctcaccaactggaagaaattggcacatggggtcagtactcagaaccattgttcaccctgatcgaatcgattccggaaggtaagaaagtcattctggtaggagaagcggggggcggcatcaatattgcactggccgcggagaaatatccggagaaagtgagcgctctcgtctttgtgaacggtcttatgcccgatatctcgcacagtccagcgttcgtggtaaagaaatatagcgaagttttcactgactggaaagattcgatcttcagcaattatacctacggtaacgacacggtcaccgcggttaaattgggagatcgtctgctggagaatatcttctccatgtctccgattgaagatgtagaactggcgaaacatcgtgtccgcaaaggctccttttttctgcaagacttggatcgcctgccgaactttacgtcggaagggtatggtggtattcgtcgtgtgtatgtttacggcgaagaagaccaggtttttagccgcgattttcagttatggcaaattaataattataagcctgataaagtgtactgtgtaccgggtggtgaccacaagattatgatcagccgcgtcaacgagctggcccagattctcggggaagttgcaaagtctgcgtcg

SEQ ID NO: 462 - protein, 255 aa, synthetic construct
  REGION 1..255: note = Description of Artificial Sequence: Synthetic polypeptide
MSAHFILIHSICHGAWLWYKLIPLLQSAGHTVTAIDLVASGSNPHQLEEIGTWGQYSEPLFTLIESIPEGKKVILVGEAGGGINIALAAEKYPEKVSALVFVNGLMPDISHSPAFVVKKYSEVFTDWKDSIFSNYTYGNDTVTAVKLGDRLLENIFSMSPIEDVELAKHRVRKGSFFLQDLDRLPNFTSEGYGGIRRVYVYGEEDQVFSRDFQLWQINNYKPDKVYCVPGGDHKIMISRVNELAQILGEVAKSAS

SEQ ID NO: 463 - DNA, 765 bp, synthetic construct
  misc_feature 1..765: note = Description of Artificial Sequence: Synthetic polynucleotide
  source 1..765: mol_type = other DNA
atgagtatgcattttattctgatccacagtatctgccatggcgcctggctgtggtataaactgatcccgttattacagtctgcaggtcataccgttacggcgattgatcttgtcgctagcgggagtaatcctcaccaactggaagaaattggcacatggggtcagtactcagaaccattgttcaccctgatcgaatcgattccggaaggtaagaaagtcattctggtaggagaagcggggggcggcatcaatattgcactggccgcggagaaatatccggagaaagtgagcgctctcgtctttgtgaacggtcttatgcccgatatctcgcacagtccagcgttcgtggtaaagaaatatagcgaagttttcactgactggaaagattcgatcttcagcaattatacctacggtaacgacacggtcaccgcggttaaattgggagatcgtctgctggagaatatcttctccatgtctccgattgaagatgtagaactggcgaaacatcgtgtccgcaaaggctccttttttctgcaagacttggatcgcctgccgaactttacgtcggaagggtatggtggtattcgtcgtgtgtatgtttacggcgaagaagaccaggtttttagccgcgattttcagttatggcaaattaataattataagcctgataaagtgtactgtgtaccgggtggtgaccacaagattatgatcagccgcgtcaacgagctggcccagattctcggggaagttgcaaactctgcgtcg

SEQ ID NO: 464 - protein, 255 aa, synthetic construct
  REGION 1..255: note = Description of Artificial Sequence: Synthetic polypeptide
MSMHFILIHSICHGAWLWYKLIPLLQSAGHTVTAIDLVASGSNPHQLEEIGTWGQYSEPLFTLIESIPEGKKVILVGEAGGGINIALAAEKYPEKVSALVFVNGLMPDISHSPAFVVKKYSEVFTDWKDSIFSNYTYGNDTVTAVKLGDRLLENIFSMSPIEDVELAKHRVRKGSFFLQDLDRLPNFTSEGYGGIRRVYVYGEEDQVFSRDFQLWQINNYKPDKVYCVPGGDHKIMISRVNELAQILGEVANSAS

SEQ ID NO: 465 - DNA, 765 bp, synthetic construct
  misc_feature 1..765: note = Description of Artificial Sequence: Synthetic polynucleotide
  source 1..765: mol_type = other DNA
atgagtgcgcattttattctgatccacagtatctgccatggcgcctggctgtggtataaactgatcccgttattacagtctgcaggtcataccgttacggcgattgatcttgtcgctagcgggagtaatcctcaccaactggaagaaattggcacatggggtcagtactcagaaccattgttcaccctgatcgaatcgattccggaaggtaagaaagtcattctggtaggagaagcggggggcggcatcaatattgcactggccgcggagaaatatccggagaaagtgagcgctctcgtctttgtgaacggtcttatgcccgatatctcgcacagtccagcgttcgtggtaaagaaatatagcgaagttttcactgactggaaagattcgatcttcagcaattatacctacggtaacgacacggtcaccgcggttaaattgggacatcgtctgctggagaatatcttctccatgtctccgattgaagatgtagaactggcgaaacatcgtgtccgcaaaggctccttttttctgcaagacttggatcgcctgccgaactttacgtcggaagggtatggtggtattcgtcgtgtgtatgtttacggcgaagaagaccaggtttttagccgcgattttcagttatggcaaattaataattataagcctgataaagtgtactgtgtaccgggtggtgaccacaagattatgatcagccgcgtcaacgagctggcccagattctcggggaagttgcaaactctgcgtcg

SEQ ID NO: 466 - protein, 255 aa, synthetic construct
  REGION 1..255: note = Description of Artificial Sequence: Synthetic polypeptide
MSAHFILIHSICHGAWLWYKLIPLLQSAGHTVTAIDLVASGSNPHQLEEIGTWGQYSEPLFTLIESIPEGKKVILVGEAGGGINIALAAEKYPEKVSALVFVNGLMPDISHSPAFVVKKYSEVFTDWKDSIFSNYTYGNDTVTAVKLGHRLLENIFSMSPIEDVELAKHRVRKGSFFLQDLDRLPNFTSEGYGGIRRVYVYGEEDQVFSRDFQLWQINNYKPDKVYCVPGGDHKIMISRVNELAQILGEVANSAS

SEQ ID NO: 467 - DNA, 765 bp, synthetic construct
  misc_feature 1..765: note = Description of Artificial Sequence: Synthetic polynucleotide
  source 1..765: mol_type = other DNA
atgagtgcgcattttattctgatccacagtatctgccatggcgcctggctgtggtataaactgatcccgttattacagtctgcaggtcataccgttacggcgattgatcttgtcgctagcgggagtaatcctcaccaactggaagaaattggcacatggggtcagtactcagaaccattgttcaccctgatcgaatcgattccggaaggtaagaaagtcattctggtaggagaagcggggggcggcatcaatattgcactggccgcggagaaatatccggagaaagtgagcgctctcgtctttgtgaacggtcttatgcccgatatctcgcacagtccagcgttcgtggtaaagaaatatagcgaagttttcactgactggaaagattcgatcttcagcaattatacctacggtaacgacacggtcaccgcggttaaattgggagatcgtctgctggaggttatcttctccatgtctccgattgaagatgtagaactggcgaaacatcgtgtccgcaaaggctccttttttctgcaagacttggatcgcctgccgaactttacgtcggaagggtatggtggtattcgtcgtgtgtatgtttacggcgaagaagaccaggtttttagccgcgattttcagttatggcaaattaataattataagcctgataaagtgtactgtgtaccgggtggtgaccacaagattatgatcagccgcgtcaacgagctggcccagattctcggggaagttgcaaactctgcgtcg

SEQ ID NO: 468 - protein, 255 aa, synthetic construct
  REGION 1..255: note = Description of Artificial Sequence: Synthetic polypeptide
MSAHFILIHSICHGAWLWYKLIPLLQSAGHTVTAIDLVASGSNPHQLEEIGTWGQYSEPLFTLIESIPEGKKVILVGEAGGGINIALAAEKYPEKVSALVFVNGLMPDISHSPAFVVKKYSEVFTDWKDSIFSNYTYGNDTVTAVKLGDRLLEVIFSMSPIEDVELAKHRVRKGSFFLQDLDRLPNFTSEGYGGIRRVYVYGEEDQVFSRDFQLWQINNYKPDKVYCVPGGDHKIMISRVNELAQILGEVANSAS

SEQ ID NO: 469 - DNA, 765 bp, synthetic construct
  misc_feature 1..765: note = Description of Artificial Sequence: Synthetic polynucleotide
  source 1..765: mol_type = other DNA
atgagtgcgcattttattctgatccacagtatctgccatggcgcctggctgtggtataaactgatcccgttattacagtctgcaggtcataccgttacggcgattgatcttgtcgctagcgggagtaatcctcaccaactggaagaaattggcacatggggtcagtactcagaaccattgttcaccctgatcgaatcgattccggaaggtaagaaagtcattctggtaggagaagcggggggcggcatcaatattgcactggccgcggagaaatatccggagaaagtgagcgctctcgtctttgtgaacggtcttatggttgatatctcgcacagtccagcgttcgtggtaaagaaatatagcgaagttttcactgactggaaagattcgatcttcagcaattatacctacggtaacgacacggtcaccgcggttaaattgggagatcgtctgctggagaatatcttctccatgtctccgattgaagatgtagaactggcgaaacatcgtgtccgcaaaggctccttttttctgcaagacttggatcgcctgccgaactttacgtcggaagggtatggtggtattcgtcgtgtgtatgtttacggcgaagaagaccaggtttttagccgcgattttcagttatggcaaattaataattataagcctgataaagtgtactgtgtaccgggtggtgaccacaagattatgatcagccgcgtcaacgagctggcccagattctcggggaagttgcaaactctgcgtcg

SEQ ID NO: 470 - protein, 255 aa, synthetic construct
  REGION 1..255: note = Description of Artificial Sequence: Synthetic polypeptide
MSAHFILIHSICHGAWLWYKLIPLLQSAGHTVTAIDLVASGSNPHQLEEIGTWGQYSEPLFTLIESIPEGKKVILVGEAGGGINIALAAEKYPEKVSALVFVNGLMVDISHSPAFVVKKYSEVFTDWKDSIFSNYTYGNDTVTAVKLGDRLLENIFSMSPIEDVELAKHRVRKGSFFLQDLDRLPNFTSEGYGGIRRVYVYGEEDQVFSRDFQLWQINNYKPDKVYCVPGGDHKIMISRVNELAQILGEVANSAS

SEQ ID NO: 471 - DNA, 765 bp, synthetic construct
  misc_feature 1..765: note = Description of Artificial Sequence: Synthetic polynucleotide
  source 1..765: mol_type = other DNA
atgagtgcgcattttattctgatccacagtatctgccatggcgcctggctgtggtataaactgatcccgttattacagtctgcaggtcataccgttacggcgattgatcttgtcgctagcgggagtaatcctcaccaactggaagaaattggcacatggggtcagtactcagaaccattgttcaccctgatcgaatcgattccggaaggtaagaaagtcattctggtaggagaagcggggggcggcatcaatattgcactggccgcggagaaatatccggagaaagtgagcgctctcgtctttgtgaacggtcttatgcccgatatctcgcacagtccagcgttcgtggtaaagaaatatagcgaagttttcactgactggaaagattcgatcttcagcaattatacctacggtaacgacacggtcaccgcggttaaattgggagatcgtctgctggagaatatcttctccatgtctccgattgaagatgtagaactggcgaaacatcgtgtccgcaaaggctccttttttctgcaagacttggatcgcctgccgaactttacgtcggaagggtatggtggtattcgtcgtgtgtatgtttacggcgaagaagaccaggtttttagccgcgattttcagttatggcaaattaataattataagcctgataaagtgtactgtgtaccgggtggtgaccacaagattatgatcagccgcgtcaacgagctggcccagattctcggggaagttgcaaactctgcgaag

SEQ ID NO: 472 - protein, 255 aa, synthetic construct
  REGION 1..255: note = Description of Artificial Sequence: Synthetic polypeptide
MSAHFILIHSICHGAWLWYKLIPLLQSAGHTVTAIDLVASGSNPHQLEEIGTWGQYSEPLFTLIESIPEGKKVILVGEAGGGINIALAAEKYPEKVSALVFVNGLMPDISHSPAFVVKKYSEVFTDWKDSIFSNYTYGNDTVTAVKLGDRLLENIFSMSPIEDVELAKHRVRKGSFFLQDLDRLPNFTSEGYGGIRRVYVYGEEDQVFSRDFQLWQINNYKPDKVYCVPGGDHKIMISRVNELAQILGEVANSAK

SEQ ID NO: 473 - DNA, 765 bp, synthetic construct
  misc_feature 1..765: note = Description of Artificial Sequence: Synthetic polynucleotide
  source 1..765: mol_type = other DNA
atgagtgcgcattttattctggttcacagtatctgccatggcgcctggctgtggtataaactgatcccgttattacagtctgcaggtcataccgttacggcgattgatcttgtcgctagcgggagtaatcctcaccaactggaagaaattggcacatggggtcagtactcagaaccattgttcaccctgatcgaatcgattccggaaggtaagaaagtcattctggtaggagaagcggggggcggcatcaatattgcactggccgcggagaaatatccggagaaagtgagcgctctcgtctttgtgaacggtcttatgcccgatatctcgcacagtccagcgttcgtggtaaagaaatatagcgaagttttcactgactggaaagattcgatcttcagcaattatacctacggtaacgacacggtcaccgcggttaaattgggagatcgtctgctggagaatatcttctccatgtctccgattgaagatgtagaactggcgaaacatcgtgtccgcaaaggctccttttttctgcaagacttggatcgcctgccgaactttacgtcggaagggtatggtggtattcgtcgtgtgtatgtttacggcgaagaagaccaggtttttagccgcgattttcagttatggcaaattaataattataagcctgataaagtgtactgtgtaccgggtggtgaccacaagattatgatcagccgcgtcaacgagctggcccagattctcggggaagttgcaaactctgcgtcg

SEQ ID NO: 474 - protein, 255 aa, synthetic construct
  REGION 1..255: note = Description of Artificial Sequence: Synthetic polypeptide
MSAHFILVHSICHGAWLWYKLIPLLQSAGHTVTAIDLVASGSNPHQLEEIGTWGQYSEPLFTLIESIPEGKKVILVGEAGGGINIALAAEKYPEKVSALVFVNGLMPDISHSPAFVVKKYSEVFTDWKDSIFSNYTYGNDTVTAVKLGDRLLENIFSMSPIEDVELAKHRVRKGSFFLQDLDRLPNFTSEGYGGIRRVYVYGEEDQVFSRDFQLWQINNYKPDKVYCVPGGDHKIMISRVNELAQILGEVANSAS

SEQ ID NO: 475 - DNA, 765 bp, synthetic construct
  misc_feature 1..765: note = Description of Artificial Sequence: Synthetic polynucleotide
  source 1..765: mol_type = other DNA
atgagtgcgcattttattctgatccacagtatctgccatggcgcctggctgtggtataaactgatcccgttattacagtctgcaggtcataccgttacggcgattgatcttgtcgctagcgggagtaatcctcaccaactggaagaaattggcacatggggtcagtactcagaaccattgttcaccctgatcgaatcgattccggaaggtaagaaagtcattctggtaggagaagcggggggcggcatcaatattgcactggccgcggagaaatatccggagaaagtgagcgctctcgtctttgtgaacggtcttatgcccgatatctcgcacagtccagcgttcgtggtaaagaaatatagcgaagttttcactgactggaaagattcgatcttcagcaattatacctacggtaacgacacggtcaccgcggttaaattgggaagtcgtctgctggagaatatcttctccatgtctccgattgaagatgtagaactggcgaaacatcgtgtccgcaaaggctccttttttctgcaagacttggatcgcctgccgaactttacgtcggaagggtatggtggtattcgtcgtgtgtatgtttacggcgaagaagaccaggtttttagccgcgattttcagttatggcaaattaataattataagcctgataaagtgtactgtgtaccgggtggtgaccacaagattatgatcagccgcgtcaacgagctggcccagattctcggggaagttgcaaactctgcgtcg

SEQ ID NO: 476 - protein, 255 aa, synthetic construct
  REGION 1..255: note = Description of Artificial Sequence: Synthetic polypeptide
MSAHFILIHSICHGAWLWYKLIPLLQSAGHTVTAIDLVASGSNPHQLEEIGTWGQYSEPLFTLIESIPEGKKVILVGEAGGGINIALAAEKYPEKVSALVFVNGLMPDISHSPAFVVKKYSEVFTDWKDSIFSNYTYGNDTVTAVKLGSRLLENIFSMSPIEDVELAKHRVRKGSFFLQDLDRLPNFTSEGYGGIRRVYVYGEEDQVFSRDFQLWQINNYKPDKVYCVPGGDHKIMISRVNELAQILGEVANSAS

SEQ ID NO: 477 - DNA, 765 bp, synthetic construct
  misc_feature 1..765: note = Description of Artificial Sequence: Synthetic polynucleotide
  source 1..765: mol_type = other DNA
atgagtgcgcattttattctgatccacagtatctgccatggcgcctgggtgtggtataaactgatcccgttattacagtctgcaggtcataccgttacggcgattgatcttgtcgctagcgggagtaatcctcaccaactggaagaaattggcacatggggtcagtactcagaaccattgttcaccctgatcgaatcgattccggaaggtaagaaagtcattctggtaggagaagcggggggcggcatcaatattgcactggccgcggagaaatatccggagaaagtgagcgctctcgtctttgtgaacggtcttatgcccgatatctcgcacagtccagcgttcgtggtaaagaaatatagcgaagttttcactgactggaaagattcgatcttcagcaattatacctacggtaacgacacggtcaccgcggttaaattgggagatcgtctgctggagaatatcttctccatgtctccgattgaagatgtagaactggcgaaacatcgtgtccgcaaaggctccttttttctgcaagacttggatcgcctgccgaactttacgtcggaagggtatggtggtattcgtcgtgtgtatgtttacggcgaagaagaccaggtttttagccgcgattttcagttatggcaaattaataattataagcctgataaagtgtactgtgtaccgggtggtgaccacaagattatgatcagccgcgtcaacgagctggcccagattctcggggaagttgcaaactctgcgtcg

SEQ ID NO: 478 - protein, 255 aa, synthetic construct
  REGION 1..255: note = Description of Artificial Sequence: Synthetic polypeptide
MSAHFILIHSICHGAWVWYKLIPLLQSAGHTVTAIDLVASGSNPHQLEEIGTWGQYSEPLFTLIESIPEGKKVILVGEAGGGINIALAAEKYPEKVSALVFVNGLMPDISHSPAFVVKKYSEVFTDWKDSIFSNYTYGNDTVTAVKLGDRLLENIFSMSPIEDVELAKHRVRKGSFFLQDLDRLPNFTSEGYGGIRRVYVYGEEDQVFSRDFQLWQINNYKPDKVYCVPGGDHKIMISRVNELAQILGEVANSAS

SEQ ID NO: 479 - DNA, 765 bp, synthetic construct
  misc_feature 1..765: note = Description of Artificial Sequence: Synthetic polynucleotide
  source 1..765: mol_type = other DNA
atgagtgcgcattttattctgatccacagtatctgccatggcgcctggctgtggtataaactgatcccgttattacagtctgcaggtcataccgttacggcgattgatcttgtcgctagcgggagtaatcctcaccaactggaagaaattggcacatggggtcagtactcagaaccattgttcaccctgatcgaatcgattccggaaggtaagaaagtcattctggtaggagaagcggggggcggcatcaatattgcactggccgcggagaaatatccggagaaagtgagcgctctcgtctttgtgaacggtcttatgcccgatatctcgcacagtccagcgttcgtggtaaagaaatatagcgaagttttcactgactggaaagattcgatcttcagctggtatacctacggtaacgacacggtcaccgcggttaaattgggagatcgtctgctggagaatatcttctccatgtctccgattgaagatgtagaactggcgaaacatcgtgtccgcaaaggctccttttttctgcaagacttggatcgcctgccgaactttacgtcggaagggtatggtggtattcgtcgtgtgtatgtttacggcgaagaagaccaggtttttagccgcgattttcagttatggcaaattaataattataagcctgataaagtgtactgtgtaccgggtggtgaccacaagattatgatcagccgcgtcaacgagctggcccagattctcggggaagttgcaaactctgcgtcg

SEQ ID NO: 480 - protein, 255 aa, synthetic construct
  REGION 1..255: note = Description of Artificial Sequence: Synthetic polypeptide
MSAHFILIHSICHGAWLWYKLIPLLQSAGHTVTAIDLVASGSNPHQLEEIGTWGQYSEPLFTLIESIPEGKKVILVGEAGGGINIALAAEKYPEKVSALVFVNGLMPDISHSPAFVVKKYSEVFTDWKDSIFSWYTYGNDTVTAVKLGDRLLENIFSMSPIEDVELAKHRVRKGSFFLQDLDRLPNFTSEGYGGIRRVYVYGEEDQVFSRDFQLWQINNYKPDKVYCVPGGDHKIMISRVNELAQILGEVANSAS

SEQ ID NO: 481 - DNA, 765 bp, synthetic construct
  misc_feature 1..765: note = Description of Artificial Sequence: Synthetic polynucleotide
  source 1..765: mol_type = other DNA
atgagtgcgcattttattctgatccacagtatctgccatggcgcctggctgtggtataaactgatcccgttattacagtctgcaggtcataccgttacggcgattgatcttgtcgctagcgggagtaatcctcaccaactggaagaaattggcacatggggtcagtactcagaaccattgttcaccctgatcgaatcgattccggaaggtaagaaagtcattctggtaggagaagcggggggcggcatcaatattgcactggccgcggagaaatatccggagaaagtgagcgctctcgtctttgtgaacggtcttatgcccgatatctcgcacagtccagcgttcgtggtaaagaaatatagcgaagttttcactatgtggaaagattcgatcttcagcaattatacctacggtaacgacacggtcaccgcggttaaattgggagatcgtctgctggagaatatcttctccatgtctccgattgaagatgtagaactggcgaaacatcgtgtccgcaaaggctccttttttctgcaagacttggatcgcctgccgaactttacgtcggaagggtatggtggtattcgtcgtgtgtatgtttacggcgaagaagaccaggtttttagccgcgattttcagttatggcaaattaataattataagcctgataaagtgtactgtgtaccgggtggtgaccacaagattatgatcagccgcgtcaacgagctggcccagattctcggggaagttgcaaactctgcgtcg

SEQ ID NO: 482 - protein, 255 aa, synthetic construct
  REGION 1..255: note = Description of Artificial Sequence: Synthetic polypeptide
MSAHFILIHSICHGAWLWYKLIPLLQSAGHTVTAIDLVASGSNPHQLEEIGTWGQYSEPLFTLIESIPEGKKVILVGEAGGGINIALAAEKYPEKVSALVFVNGLMPDISHSPAFVVKKYSEVFTMWKDSIFSNYTYGNDTVTAVKLGDRLLENIFSMSPIEDVELAKHRVRKGSFFLQDLDRLPNFTSEGYGGIRRVYVYGEEDQVFSRDFQLWQINNYKPDKVYCVPGGDHKIMISRVNELAQILGEVANSAS

SEQ ID NO: 483 - DNA, 765 bp, synthetic construct
  misc_feature 1..765: note = Description of Artificial Sequence: Synthetic polynucleotide
  source 1..765: mol_type = other DNA
atgagtgcgcattttattctgatccacagtatctgccatggcgcctggctgtggtataaactgatcccgttattacagtctgcaggtcataccgttacggcgattgatcttgtcgctagcgggagtaatcctcaccaactggaagaaattggcacatggggtcagtactcagaaccattgttcaccctgatcgaatcgattccggaaggtaagaaagtcattctggtaggagaagcggggggcggcatcaatattgcactggccgcggagaaatatccggagaaagtgagcgctctcgtctttgtgaacggtcttatgcccgatatctcgcacagtccagcgttcgtggtaaacaagtatagcgaagttttcactgactggaaagattcgatcttcagcaattatacctacggtaacgacacggtcaccgcggttaaattgggagatcgtctgctggagaatatcttctccatgtctccgattgaagatgtagaactggcgaaacatcgtgtccgcaaaggctccttttttctgcaagacttggatcgcctgccgaactttacgtcggaagggtatggtggtattcgtcgtgtgtatgtttacggcgaagaagaccaggtttttagccgcgattttcagttatggcaaattaataattataagcctgataaagtgtactgtgtatcgggtggtgaccacaagattatgatcagccgcgtcaacgagctggcccagattctcggggaagttgcaaactctgcgtcg

SEQ ID NO: 484 - protein, 255 aa, synthetic construct
  REGION 1..255: note = Description of Artificial Sequence: Synthetic polypeptide
MSAHFILIHSICHGAWLWYKLIPLLQSAGHTVTAIDLVASGSNPHQLEEIGTWGQYSEPLFTLIESIPEGKKVILVGEAGGGINIALAAEKYPEKVSALVFVNGLMPDISHSPAFVVNKYSEVFTDWKDSIFSNYTYGNDTVTAVKLGDRLLENIFSMSPIEDVELAKHRVRKGSFFLQDLDRLPNFTSEGYGGIRRVYVYGEEDQVFSRDFQLWQINNYKPDKVYCVSGGDHKIMISRVNELAQILGEVANSAS

SEQ ID NO: 485 - DNA, 765 bp, synthetic construct
  misc_feature 1..765: note = Description of Artificial Sequence: Synthetic polynucleotide
  source 1..765: mol_type = other DNA
atgagtgcgcattttattctgatccacagtatctgccatggcgcctggctgtggtataaactgatcccgttattacagtctgcaggtcataccgttacggcgattgatcttgtcgctagcgggagtaatcctcaccaactggaagaaattggcacatggggtcagtactcagaaccattgttcaccctgatcgaatcgattccggaaggtaagaaagtcattctggtaggagaagcggggggcggcatcaatattgcactggccgcggagaaatatccggagaaagtgagcgctctcgtctttgtgaacggtcttatgcccgatatctcgcacagtccagcgttcgtggtaaagaaatatagcgaagttttcactgactggaaagattcgatcttcagcaattatacctacggtaacgacacggtcaccgcggttaaattgggagatcgtctgctggagaatatcttctccatgtctccgattgaagatgtagaactggcgaaacatcgtgtccgcaaaggctccttttttctgcaagacttggatcgcctgccgaactttacgtcggaagggtatggtggtattcgtcgtgtgtatgtttacggcgaagaagaccaggtttttagccgcgattttcagttatggcaaattaataattataagcctgataaagtgtactgtgtaccgggtggtgaccacaagattatgatcagccgcgtcaacgagctggcccagattctcggggaagttgcaaactctctttcg

SEQ ID NO: 486 - protein, 255 aa, synthetic construct
  REGION 1..255: note = Description of Artificial Sequence: Synthetic polypeptide
MSAHFILIHSICHGAWLWYKLIPLLQSAGHTVTAIDLVASGSNPHQLEEIGTWGQYSEPLFTLIESIPEGKKVILVGEAGGGINIALAAEKYPEKVSALVFVNGLMPDISHSPAFVVKKYSEVFTDWKDSIFSNYTYGNDTVTAVKLGDRLLENIFSMSPIEDVELAKHRVRKGSFFLQDLDRLPNFTSEGYGGIRRVYVYGEEDQVFSRDFQLWQINNYKPDKVYCVPGGDHKIMISRVNELAQILGEVANSLS

SEQ ID NO: 487 - DNA, 765 bp, synthetic construct
  misc_feature 1..765: note = Description of Artificial Sequence: Synthetic polynucleotide
  source 1..765: mol_type = other DNA
atgagtgcgcattttattctgatccacagtatctgccatggcgcctggctgtggtataaactgatcccgttattacagtctgcaggtcataccgttacggcgattgatcttgtcgctagcgggagtaatcctcaccaactggaagaaattggcacatggggtcagtactcagaaccattgttcaccctgatcgaatcgattccggaaggtaagaaagtcattctggtaggagaagcggggggcggcatcaatattgcactggccgcggagaaatatccggagaaagtgagcgctctcgtctttgtgaacggtcttatgcccgatatctcgcacagtccagcgttcgtggtaaagaaatatagcgaagttttcactgactggaaagattcgatcttcagctgttatacctacggtaacgacacggtcaccgcggttaaattgggagatcgtctgctggagaatatcttctccatgtctccgattgaagatgtagaactggcgaaacatcgtgtccgcaaaggctccttttttctgcaagacttggatcgcctgccgaactttacgtcggaagggtatggtggtattcgtcgtgtgtatgtttacggcgaagaagaccaggtttttagccgcgattttcagttatggcaaattaataattataagcctgataaagtgtactgtgtaccgggtggtgaccacaagattatgatcagccgcgtcaacgagctggcccagattctcggggaagttgcaaactctgcgtcg

SEQ ID NO: 488 - protein, 255 aa, synthetic construct
  REGION 1..255: note = Description of Artificial Sequence: Synthetic polypeptide
MSAHFILIHSICHGAWLWYKLIPLLQSAGHTVTAIDLVASGSNPHQLEEIGTWGQYSEPLFTLIESIPEGKKVILVGEAGGGINIALAAEKYPEKVSALVFVNGLMPDISHSPAFVVKKYSEVFTDWKDSIFSCYTYGNDTVTAVKLGDRLLENIFSMSPIEDVELAKHRVRKGSFFLQDLDRLPNFTSEGYGGIRRVYVYGEEDQVFSRDFQLWQINNYKPDKVYCVPGGDHKIMISRVNELAQILGEVANSAS

SEQ ID NO: 489 - DNA, 765 bp, synthetic construct
  misc_feature 1..765: note = Description of Artificial Sequence: Synthetic polynucleotide
  source 1..765: mol_type = other DNA
atgagtgcgcattttattctgtgtcacagtatctgccatggcgcctggctgtggtataaactgatcccgttattacagtctgcaggtcataccgttacggcgattgatcttgtcgctagcgggagtaatcctcaccaactggaagaaattggcacatggggtcagtactcagaaccattgttcaccctgatcgaatcgattccggaaggtaagaaagtcattctggtaggagaagcggggggcggcatcaatattgcactggccgcggagaaatatccggagaaagtgagcgctctcgtctttgtgaacggtcttatgcccgatatctcgcacagtccagcgttcgtggtaaagaaatatagcgaagttttcactgactggaaagattcgatcttcagcaattatacctacggtaacgacacggtcaccgcggttaaattgggagatcgtctgctggagaatatcttctccatgtctccgattgaagatgtagaactggcgaaacatcgtgtccgcaaaggctccttttttctgcaagacttggatcgcctgccgaactttacgtcggaagggtatggtggtattcgtcgtgtgtatgtttacggcgaagaagaccaggtttttagccgcgattttcagttatggcaaattaataattataagcctgataaagtgtactgtgtaccgggtggtgaccacaagattatgatcagccgcgtcaacgagctggcccagattctcggggaagttgcaaactctgcgtcg

SEQ ID NO: 490 - protein, 255 aa, synthetic construct
  REGION 1..255: note = Description of Artificial Sequence: Synthetic polypeptide
MSAHFILCHSICHGAWLWYKLIPLLQSAGHTVTAIDLVASGSNPHQLEEIGTWGQYSEPLFTLIESIPEGKKVILVGEAGGGINIALAAEKYPEKVSALVFVNGLMPDISHSPAFVVKKYSEVFTDWKDSIFSNYTYGNDTVTAVKLGDRLLENIFSMSPIEDVELAKHRVRKGSFFLQDLDRLPNFTSEGYGGIRRVYVYGEEDQVFSRDFQLWQINNYKPDKVYCVPGGDHKIMISRVNELAQILGEVANSAS

SEQ ID NO: 491 - DNA, 765 bp, synthetic construct
  misc_feature 1..765: note = Description of Artificial Sequence: Synthetic polynucleotide
  source 1..765: mol_type = other DNA
atgagtgcgcattttattctgatccacagtatctgccatggcgcctggctgtggtataaactgatcccgttattacagtctgcaggtcataccgttacggcgattgatcttgtcgctagcgggagtaatcctcaccaactggaagaaattggcacatggggtcagtactcagaaccattgttcaccctgatcgaatcgattccggaaggtaagaaagtcattctggtaggagaagcggggggcggcatcaatattgcactggccgcggagaaatatccggagaaagtgagcgctctcgtctttgtgaacggtcttatgcccgatatctcgcacagtccagcgttcgtggtaaagaaatatagcgaagttttcactgactggaaagattcgatcttcagcaattatacctacggtaacgacacggtcaccgcggttaaattgggagatcgtctgctggagaatatcttctccatgtctccgattgaagatgtagaactggcgaaacatcgtgtccgcaaaggctccttttttctgcaagacttgctgcgcctgccgaactttacgtcggaagggtatggtggtattcgtcgtgtgtatgtttacggcgaagaagaccaggtttttagccgcgattttcagttatggcaaattaataattataagcctgataaagtgtactgtgtaccgggtggtgaccacaagattatgatcagccgcgtcaacgagctggcccagattctcggggaagttgcaaactctgcgtcg

SEQ ID NO: 492 - protein, 255 aa, synthetic construct
  REGION 1..255: note = Description of Artificial Sequence: Synthetic polypeptide
MSAHFILIHSICHGAWLWYKLIPLLQSAGHTVTAIDLVASGSNPHQLEEIGTWGQYSEPLFTLIESIPEGKKVILVGEAGGGINIALAAEKYPEKVSALVFVNGLMPDISHSPAFVVKKYSEVFTDWKDSIFSNYTYGNDTVTAVKLGDRLLENIFSMSPIEDVELAKHRVRKGSFFLQDLLRLPNFTSEGYGGIRRVYVYGEEDQVFSRDFQLWQINNYKPDKVYCVPGGDHKIMISRVNELAQILGEVANSAS

SEQ ID NO: 493 - DNA, 765 bp, synthetic construct
  misc_feature 1..765: note = Description of Artificial Sequence: Synthetic polynucleotide
  source 1..765: mol_type = other DNA
atgagtgcgcattttattctgatccacagtatctgccatggcgcctggctgtggtataaactgatcccgttattacagtctgcaggtcataccgttacggcgattgatcttgtcgctagcgggagtaatcctcaccaactggaagaaattggcacatggggtcagtactcagaaccattgttcaccctgatcgaatcgattccggaaggtaagaaagtcattctggtaggagaagcggggggcggcatcaatattgcactggccgcggagaaatatccggagaaagtgagcgctctcgtctttgtgaacggtcttatgcccgatatctcgcacagtccagcgttcgtggtaaagaaatatagcgaagttttcactgactggaaagattcgatcttcagcaattatacctacggtaacgacacggtcaccgcggttaaattgggagatcgtctgctggagaatatcttctccatgtctccgattgaagatgtagaactggcgaaacatcgtgtccgcaaaggctccttttttctgcaagacttggatcgcctgccgaactttacgtcggaagggtatggtggtattcgtcgtgtgtatgtttacggcgaagaagaccaggtttttagccgcgatttttttttatggcaaattaataattataagcctgataaagtgtactgtgtaccgggtggtgaccacaagattatgatcagccgcgtcaacgagctggcccagattctcggggaagttgcaaactctgcgtcg

SEQ ID NO: 494 - protein, 255 aa, synthetic construct
  REGION 1..255: note = Description of Artificial Sequence: Synthetic polypeptide
MSAHFILIHSICHGAWLWYKLIPLLQSAGHTVTAIDLVASGSNPHQLEEIGTWGQYSEPLFTLIESIPEGKKVILVGEAGGGINIALAAEKYPEKVSALVFVNGLMPDISHSPAFVVKKYSEVFTDWKDSIFSNYTYGNDTVTAVKLGDRLLENIFSMSPIEDVELAKHRVRKGSFFLQDLDRLPNFTSEGYGGIRRVYVYGEEDQVFSRDFFLWQINNYKPDKVYCVPGGDHKIMISRVNELAQILGEVANSAS

SEQ ID NO: 495 - DNA, 765 bp, synthetic construct
  misc_feature 1..765: note = Description of Artificial Sequence: Synthetic polynucleotide
  source 1..765: mol_type = other DNA
atgagtgcgcattttattctgatccacagtatctgccatggcgcctggctgtggtataaactgatcccgttattacagtctgcaggtcataccgttacggcgattgatcttgtcgctagcgggagtaatcctcaccaactggaagaaattggcacatggggtcagtactcagaaccattgttcaccctgatcgaatcgattccggaaggtaagaaagtcattctggtaggagaagcggggggcggcatcaatattgcactggccgcggagaaatatccggagaaagtgagcgctctcgtctttgtgaacggtcttcagcccgatatctcgcacagtccagcgttcgtggtaaagaaatatagcgaagttttcactgactggaaagattcgatcttcagcaattatacctacggtaacgacacggtcaccgcggttaaattgggagatcgtctgctggagaatatcttctccatgtctccgattgaagatgtagaactggcgaaacatcgtgtccgcaaaggctccttttttctgcaagacttggatcgcctgccgaactttacgtcggaagggtatggtggtattcgtcgtgtgtatgtttacggcgaagaagaccaggtttttagccgcgattttcagttatggcaaattaataattataagcctgataaagtgtactgtgtaccgggtggtgaccacaagattatgatcagccgcgtcaacgagctggcccagattctcggggaagttgcaaactctgcgtcg

SEQ ID NO: 496 - protein, 255 aa, synthetic construct
  REGION 1..255: note = Description of Artificial Sequence: Synthetic polypeptide
MSAHFILIHSICHGAWLWYKLIPLLQSAGHTVTAIDLVASGSNPHQLEEIGTWGQYSEPLFTLIESIPEGKKVILVGEAGGGINIALAAEKYPEKVSALVFVNGLQPDISHSPAFVVKKYSEVFTDWKDSIFSNYTYGNDTVTAVKLGDRLLENIFSMSPIEDVELAKHRVRKGSFFLQDLDRLPNFTSEGYGGIRRVYVYGEEDQVFSRDFQLWQINNYKPDKVYCVPGGDHKIMISRVNELAQILGEVANSAS

SEQ ID NO: 497 - DNA, 765 bp, synthetic construct
  misc_feature 1..765: note = Description of Artificial Sequence: Synthetic polynucleotide
  source 1..765: mol_type = other DNA
atgagtgcgcattttattctgatccacagtatctgccatggcgcctggctgtggtataaactgatcccgttattacagtctgcaggtcataccgttacggcgattgatcttgtcgctagcgggagtaatcctcaccaactggaagaaattggcacatggggtcagtactcagaaccattgttcaccctgatcgaatcgattccggaaggtaagaaagtcattctggtaggagaagcggggggcggcatcaatattgcactggccgcggagaaatatccggagaaagtgagcgctctcgtctttgtgaacggtcttatgcccgatatctcgcacagtccagcgttcgtggtaaagaaatatagcgaagttttcactgactggaaagattcgatcttcagcaattatacctacggtaacgacacggtcaccgcggttaaattgggagatcgtctgctggagaatatcttctccatgtctccgattgaagatgtagaactggcgaaacatcgtgtccgcaaaggctccttttttctgcaatctttggatcgcctgccgaactttacgtcggaagggtatggtggtattcgtcgtgtgtatgtttacggcgaagaagaccaggtttttagccgcgattttcagttatggcaaattaataattataagcctgataaagtgtactgtgtaccgggtggtgaccacaagattatgatcagccgcgtcaacgagctggcccagattctcggggaagttgcaaactctgcgtcg

SEQ ID NO: 498 - protein, 255 aa, synthetic construct
  REGION 1..255: note = Description of Artificial Sequence: Synthetic polypeptide
MSAHFILIHSICHGAWLWYKLIPLLQSAGHTVTAIDLVASGSNPHQLEEIGTWGQYSEPLFTLIESIPEGKKVILVGEAGGGINIALAAEKYPEKVSALVFVNGLMPDISHSPAFVVKKYSEVFTDWKDSIFSNYTYGNDTVTAVKLGDRLLENIFSMSPIEDVELAKHRVRKGSFFLQSLDRLPNFTSEGYGGIRRVYVYGEEDQVFSRDFQLWQINNYKPDKVYCVPGGDHKIMISRVNELAQILGEVANSAS

SEQ ID NO: 499 - DNA, 765 bp, synthetic construct
  misc_feature 1..765: note = Description of Artificial Sequence: Synthetic polynucleotide
  source 1..765: mol_type = other DNA
atgagtgcgcattttattctgatccacagtatctgccatggcgcctggctgtggtataaactgatcccgttattacagtctgcaggtcataccgttacggcgattgatcttgtcgctagcgggagtaatcctcaccaactggaagaaattggcacatggggtcagtactcagaaccattgttcaccctgatcgaatcgattccggaaggtaagaaagtcattctggtaggagaagcggggggcggcatcaatattgcactggccgcggagaaatatccggagaaagtgagcgctctcgtctttgtgaacggtcttatgcccgatatctcgcacagtccagcgttcgtggtaaagaaatatagcgaagttttcactgactggaaagattcgatcttcagcaattatacctacggtaacgacacggtcaccgcggttaaattgggagatcgtctgctggagaatatcttctccatgtctccgattgaagatgtagaactggcgaaacatcgtgtccgcaaaggctccttttttctgcaagacttggatcgcctgccgaactttacgtcggaagggtatggtggtattcgtcgtgtgtatgtttacggcgaagaagaccaggtttttagccgcgattttcagttatggcaaattaataattataagcctgataaagtgtactgtgtaccgggtggtgaccacaagattatgatcagccgcgtcaacgagctggcccagattctcggggaagttgcaaactctgtttcg

SEQ ID NO: 500 - protein, 255 aa, synthetic construct
  REGION 1..255: note = Description of Artificial Sequence: Synthetic polypeptide
MSAHFILIHSICHGAWLWYKLIPLLQSAGHTVTAIDLVASGSNPHQLEEIGTWGQYSEPLFTLIESIPEGKKVILVGEAGGGINIALAAEKYPEKVSALVFVNGLMPDISHSPAFVVKKYSEVFTDWKDSIFSNYTYGNDTVTAVKLGDRLLENIFSMSPIEDVELAKHRVRKGSFFLQDLDRLPNFTSEGYGGIRRVYVYGEEDQVFSRDFQLWQINNYKPDKVYCVPGGDHKIMISRVNELAQILGEVANSVS

SEQ ID NO: 501 - DNA, 765 bp, synthetic construct
  misc_feature 1..765: note = Description of Artificial Sequence: Synthetic polynucleotide
  source 1..765: mol_type = other DNA
atgagtgcgcattttattctgatccacagtatctgccatggcgcctggctgtggtataaactgatcccgttattacagtctgcaggtcataccgttacggcgattgatcttgtcgctagcgggagtaatcctcaccaactggaagaaattggcacatggggtcagtactcagaaccattgttcaccctgatcgaatcgattccggaaggtaagaaagtcattctggtaggagaagcggggggcggcatcaatattgcactggccgcggagaaatatccggagaaagtgagcgctctcgtctttctgaacggtcttatgcccgatatctcgcacagtccagcgttcgtggtaaagaaatatagcgaagttttcactgactggaaagattcgatcttcagcaattatacctacggtaacgacacggtcaccgcggttaaattgggagatcgtctgctggagaatatcttctccatgtctccgattgaagatgtagaactggcgaaacatcgtgtccgcaaaggctccttttttctgcaagacttggatcgcctgccgaactttacgtcggaagggtatggtggtattcgtcgtgtgtatgtttacggcgaagaagaccaggtttttagccgcgattttcagttatggcaaattaataattataagcctgataaagtgtactgtgtaccgggtggtgaccacaagattatgatcagccgcgtcaacgagctggcccagattctcggggaagttgcaaactctgcgtcg

SEQ ID NO: 502 - protein, 255 aa, synthetic construct
  REGION 1..255: note = Description of Artificial Sequence: Synthetic polypeptide
MSAHFILIHSICHGAWLWYKLIPLLQSAGHTVTAIDLVASGSNPHQLEEIGTWGQYSEPLFTLIESIPEGKKVILVGEAGGGINIALAAEKYPEKVSALVFLNGLMPDISHSPAFVVKKYSEVFTDWKDSIFSNYTYGNDTVTAVKLGDRLLENIFSMSPIEDVELAKHRVRKGSFFLQDLDRLPNFTSEGYGGIRRVYVYGEEDQVFSRDFQLWQINNYKPDKVYCVPGGDHKIMISRVNELAQILGEVANSAS

SEQ ID NO: 503 - DNA, 765 bp, synthetic construct
  misc_feature 1..765: note = Description of Artificial Sequence: Synthetic polynucleotide
  source 1..765: mol_type = other DNA
atgagtgcgcattttattctgatccacagtatctgccatggcgcctggctgtggtataaactgatcccgttattacagtctgcaggtcataccgttacggcgattgatcttgtcgctagcgggagtaatcctcaccaactggaagaaattggcacatggggtcagtactcagaaccattgttcaccctgatcgaatcgattccggaaggtaagaaagtcattctggtaggagaagcggggggcggcatcaatattgcactggccgcggagaaatatccggagaaagtgagcgctctcgtctttgtgaacggtcttatgcccgatatctcgcacagtccagcgttcgtggtaaagaaatatagcgaagttttcactgactggaaagattcgatcttcagcaattatacctacggtaacgacacggtcaccgcggttgctttgggagatcgtctgctggagaatatcttctccatgtctccgattgaagatgtagaactggcgaaacatcgtgtccgcaaaggctccttttttctgcaagacttggatcgcctgccgaactttacgtcggaagggtatggtggtattcgtcgtgtgtatgtttacggcgaagaagaccaggtttttagccgcgattttcagttatggcaaattaataattataagcctgataaagtgtactgtgtaccgggtggtgaccacaagattatgatcagccgcgtcaacgagctggcccagattctcggggaagttgcaaactctgcgtcg

SEQ ID NO: 504 - protein, 255 aa, synthetic construct
  REGION 1..255: note = Description of Artificial Sequence: Synthetic polypeptide
MSAHFILIHSICHGAWLWYKLIPLLQSAGHTVTAIDLVASGSNPHQLEEIGTWGQYSEPLFTLIESIPEGKKVILVGEAGGGINIALAAEKYPEKVSALVFVNGLMPDISHSPAFVVKKYSEVFTDWKDSIFSNYTYGNDTVTAVALGDRLLENIFSMSPIEDVELAKHRVRKGSFFLQDLDRLPNFTSEGYGGIRRVYVYGEEDQVFSRDFQLWQINNYKPDKVYCVPGGDHKIMISRVNELAQILGEVANSAS

SEQ ID NO: 505 - DNA, 765 bp, synthetic construct
  misc_feature 1..765: note = Description of Artificial Sequence: Synthetic polynucleotide
  source 1..765: mol_type = other DNA
atgagtgcgcattttattctgatccacagtatctgccatggcgcctggctgtggtataaactgatcccgttattacagtctgcaggtcataccgttacggcgattgatcttgtcgctagcgggagtaatcctcaccaactggaagaaattggcacatggggtcagtactcagaaccattgttcaccctgatcgaatcgattccggaaggtaagaaagtcattctggtaggagaagcggggggcggcatcaatattgcactggccgcggagaaatatccggagaaagtgagcgctctcgtctttgtgaacggtcttatgcccgatatctcgcacagtccagcgttcgtggcgaagaaatatagcgaagttttcactgactggaaagattcgatcttcagcaattatacctacggtaacgacacggtcaccgcggttaaattgggagatcgtctgctggagaatatcttctccatgtctccgattgaagatgtagaactggcgaaacatcgtgtccgcaaaggctccttttttctgcaagacttggatcgcctgccgaactttacgtcggaagggtatggtggtattcgtcgtgtgtatgtttacggcgaagaagaccaggtttttagccgcgattttcagttatggcaaattaataattataagcctgataaagtgtactgtgtaccgggtggtgaccacaagattatgatcagccgcgtcaacgagctggcccagattctcggggaagttgcaaactctgcgtcg

SEQ ID NO: 506 - protein, 255 aa, synthetic construct
  REGION 1..255: note = Description of Artificial Sequence: Synthetic polypeptide
MSAHFILIHSICHGAWLWYKLIPLLQSAGHTVTAIDLVASGSNPHQLEEIGTWGQYSEPLFTLIESIPEGKKVILVGEAGGGINIALAAEKYPEKVSALVFVNGLMPDISHSPAFVAKKYSEVFTDWKDSIFSNYTYGNDTVTAVKLGDRLLENIFSMSPIEDVELAKHRVRKGSFFLQDLDRLPNFTSEGYGGIRRVYVYGEEDQVFSRDFQLWQINNYKPDKVYCVPGGDHKIMISRVNELAQILGEVANSAS

SEQ ID NO: 507 - DNA, 765 bp, synthetic construct
  misc_feature 1..765: note = Description of Artificial Sequence: Synthetic polynucleotide
  source 1..765: mol_type = other DNA
atgagtgcgcattttattctgatccacagtatctgccatggcgcctggctgtggtataaactgatcccgttattacagtctgcaggtcataccgttacggcgattgatcttgtcgctagcgggagtaatcctcaccaactggaagaaattggcacatggggtcagtactcagaaccattgttcaccctgatcgaatcgattccggaaggtaagaaagtcattctggtaggagaagcggggggcggcatcaatattgcactggccgcggagaaatatccggagaaagtgagcgctctcgtctttgtgaacggtcttatgcccgatatctcgcacagtccagcgttcgtggtaaagaaatatagcgaagttttcactgactggaaagattcgatcttcagcaattatacctacggtaacgacacggtcaccgcggttaaattgggagatcgtctgctggagaatatcttctccatgtctccgattgaagatgtagaactggcgaaacatcgtgtccgcaaaggctccttttttctgcaagacttggatcgcctgccgaactttacgtcggaagggtatggtggtattcgtcgtgtgtatgtttacggcgaagaagaccaggtttttagccgcgattttcagttatggcaaattaataattataagcctgataaagtgtactgtgtaccgggtggtgaccacaagattatgatcagccgcgtcaacgagctggcccagattctcggggaagttgcaaacgttgcgtcg

SEQ ID NO: 508 - protein, 255 aa, synthetic construct
  REGION 1..255: note = Description of Artificial Sequence: Synthetic polypeptide
MSAHFILIHSICHGAWLWYKLIPLLQSAGHTVTAIDLVASGSNPHQLEEIGTWGQYSEPLFTLIESIPEGKKVILVGEAGGGINIALAAEKYPEKVSALVFVNGLMPDISHSPAFVVKKYSEVFTDWKDSIFSNYTYGNDTVTAVKLGDRLLENIFSMSPIEDVELAKHRVRKGSFFLQDLDRLPNFTSEGYGGIRRVYVYGEEDQVFSRDFQLWQINNYKPDKVYCVPGGDHKIMISRVNELAQILGEVANVAS

SEQ ID NO: 509 - DNA, 765 bp, synthetic construct
  misc_feature 1..765: note = Description of Artificial Sequence: Synthetic polynucleotide
  source 1..765: mol_type = other DNA
atgagtgcgcattttattctgatccacagtatctgccatggcgcctggctgtggtataaactgatcccgttattacagtctgcaggtcataccgttacggcgattgatcttgtcgctagcgggagtaatcctcaccaactggaagaaattggcacatggggtcagtactcagaaccattgttcaccctgatcgaatcgattccggaaggtaagaaagtcattctggtaggagaagcggggggcggcatcaatattgcactggccgcggagaaatatccggagaaagtgagcgctctcgtctttgtgaacggtcttatgcccgatatctcgcacagtccagcgttcgtggtaaagagttatagcgaagttttcactgactggaaagattcgatcttcagcaattatacctacggtaacgacacggtcaccgcggttaaattgggagatcgtctgctggagaatatcttctccatgtctccgattgaagatgtagaactggcgaaacatcgtgtccgcaaaggctccttttttctgcaagacttggatcgcctgccgaactttacgtcggaagggtatggtggtattcgtcgtgtgtatgtttacggcgaagaagaccaggtttttagccgcgattttcagttatggcaaattaataattataagcctgataaagtgtactgtgtaccgggtggtgaccacaagattatgatcagccgcgtcaacgagctggcccagattctcggggaagttgcaaactctgcgtcg

SEQ ID NO: 510 - protein, 255 aa, synthetic construct
  REGION 1..255: note = Description of Artificial Sequence: Synthetic polypeptide
MSAHFILIHSICHGAWLWYKLIPLLQSAGHTVTAIDLVASGSNPHQLEEIGTWGQYSEPLFTLIESIPEGKKVILVGEAGGGINIALAAEKYPEKVSALVFVNGLMPDISHSPAFVVKSYSEVFTDWKDSIFSNYTYGNDTVTAVKLGDRLLENIFSMSPIEDVELAKHRVRKGSFFLQDLDRLPNFTSEGYGGIRRVYVYGEEDQVFSRDFQLWQINNYKPDKVYCVPGGDHKIMISRVNELAQILGEVANSAS

SEQ ID NO: 511 - DNA, 765 bp, synthetic construct
  misc_feature 1..765: note = Description of Artificial Sequence: Synthetic polynucleotide
  source 1..765: mol_type = other DNA
atgagtgcgcattttattctgatccacagtatctgccatggcgcctggctgtggtataaactgatcccgttattacagtctgcaggtcataccgttacggcgattgatcttgtcgctagcgggagtaatcctcaccaactggaagaaattggcacatggggtcagtactcagaaccattgttcaccctgatcgaatcgattccggaaggtaagaaagtcattctggtaggagaagcggggggcggcatcaatattgcactggccgcggagaaatatccggagaaagtgagcgctctcgtctttgtgaacggtcttatgcccgatatctcgcacagtccagcgttcgtggtaaagaaatatagcgaagttttcactgactggaaagattcgatcttcagcaattatacctacggtaacgacacggtcaccgcggttaaattgggagatcgtctgctggagaatatcttctccatgtctccgattgaagatgtagaactggcgaaacatcgtgtccgcaaaggctccttttttctgcaagacttggcgcgcctgccgaactttacgtcggaagggtatggtggtattcgtcgtgtgtatgtttacggcgaagaagaccaggtttttagccgcgattttcagttatggcaaattaataattataagcctgataaagtgtactgtgtaccgggtggtgaccacaagattatgatcagccgcgtcaacgagctggcccagattctcggggaagttgcaaactctgcgtcg

SEQ ID NO: 512 - protein, 255 aa, synthetic construct
  REGION 1..255: note = Description of Artificial Sequence: Synthetic polypeptide
MSAHFILIHSICHGAWLWYKLIPLLQSAGHTVTAIDLVASGSNPHQLEEIGTWGQYSEPLFTLIESIPEGKKVILVGEAGGGINIALAAEKYPEKVSALVFVNGLMPDISHSPAFVVKKYSEVFTDWKDSIFSNYTYGNDTVTAVKLGDRLLENIFSMSPIEDVELAKHRVRKGSFFLQDLARLPNFTSEGYGGIRRVYVYGEEDQVFSRDFQLWQINNYKPDKVYCVPGGDHKIMISRVNELAQILGEVANSAS

SEQ ID NO: 513 - DNA, 765 bp, synthetic construct
  misc_feature 1..765: note = Description of Artificial Sequence: Synthetic polynucleotide
  source 1..765: mol_type = other DNA
atgagtgcgcattttattctgatccacagtatctgccatggcgcctggctgtggtataaactgatcccgttattacagtctgcaggtcataccgttacggcgattgatcttgtcgctagcgggagtaatcctcaccaactggaagaaattggcacatggggtcagtactcagaaccattgttcaccctgatcgaatcgattccggaaggtaagaaagtcattctggtaggagaagcggggggcggcatcaatattgcactggccgcggagaaatatccggagaaagtgagcgctctcgtctttgtgaacggtcttatgcccgatatctcgcacagtccagcgttcgtggtaaagaaatatagcgaagttttcactgactggaaagattcgatcttcagcaattatacctacggtaacgacacggtcaccgcggttaaattgggagatcgtctgctggagaatatcttctccatgtctccgattgaagatgtagaactggcgaaacatcgtgtccgcaaaggctccttttttctgcaagacttggatcgcctgccgaactttacgtcggaagggtatggtggtattcgtcgtgtgtatgtttacggcgaagaagaccaggtttttagccgcgattttcagttatgggagattaataattataagcctgataaagtgtactgtgtaccgggtggtgaccacaagattatgatcagccgcgtcaacgagctggcccagattctcggggaagttgcaaactctgcgtcg

SEQ ID NO: 514 - protein, 255 aa, synthetic construct
  REGION 1..255: note = Description of Artificial Sequence: Synthetic polypeptide
MSAHFILIHSICHGAWLWYKLIPLLQSAGHTVTAIDLVASGSNPHQLEEIGTWGQYSEPLFTLIESIPEGKKVILVGEAGGGINIALAAEKYPEKVSALVFVNGLMPDISHSPAFVVKKYSEVFTDWKDSIFSNYTYGNDTVTAVKLGDRLLENIFSMSPIEDVELAKHRVRKGSFFLQDLDRLPNFTSEGYGGIRRVYVYGEEDQVFSRDFQLWEINNYKPDKVYCVPGGDHKIMISRVNELAQILGEVANSAS

SEQ ID NO: 515 - DNA, 765 bp, synthetic construct
  misc_feature 1..765: note = Description of Artificial Sequence: Synthetic polynucleotide
  source 1..765: mol_type = other DNA
atgagtgcgcattttattctgatccacagtatctgccatggcgcctggctgtggtataaactgatcccgttattacagtctgcaggtcataccgttacggcgattgatcttgtcgctagcgggagtaatcctcaccaactggaagaaattggcacatggggtcagtactcagaaccattgttcaccctgatcgaatcgattccggaaggtaagaaagtcattctggtaggagaagcggggggcggcatcaatattgcactggccgcggagaaatatccggagaaagtgagcgctctcgtctttgtgaacggtcttatgcccgatatctcgcacagtccagcgttcgtggtaaagaaatatagcgctgttttcactgactggaaagattcgatcttcagcaattatacctacggtaacgacacggtcaccgcggttaaattgggagatcgtctgctggagaatatcttctccatgtctccgattgaagatgtagaactggcgaaacatcgtgtccgcaaaggctccttttttctgcaagacttggatcgcctgccgaactttacgtcggaagggtatggtggtattcgtcgtgtgtatgtttacggcgaagaagaccaggtttttagccgcgattttcagttatggcaaattaataattataagcctgataaagtgtactgtgtaccgggtggtgaccacaagattatgatcagccgcgtcaacgagctggcccagattctcggggaagttgcaaactctgcgtcg

SEQ ID NO: 516 - protein, 255 aa, synthetic construct
  REGION 1..255: note = Description of Artificial Sequence: Synthetic polypeptide
MSAHFILIHSICHGAWLWYKLIPLLQSAGHTVTAIDLVASGSNPHQLEEIGTWGQYSEPLFTLIESIPEGKKVILVGEAGGGINIALAAEKYPEKVSALVFVNGLMPDISHSPAFVVKKYSAVFTDWKDSIFSNYTYGNDTVTAVKLGDRLLENIFSMSPIEDVELAKHRVRKGSFFLQDLDRLPNFTSEGYGGIRRVYVYGEEDQVFSRDFQLWQINNYKPDKVYCVPGGDHKIMISRVNELAQILGEVANSAS

SEQ ID NO: 517 - DNA, 765 bp, synthetic construct
  misc_feature 1..765: note = Description of Artificial Sequence: Synthetic polynucleotide
  source 1..765: mol_type = other DNA
atgagtgcgcattttattctgatccacagtatctgccatggcgcctggctgtggtataaactgatcccgttattacagtctgcaggtcataccgttacggcgattgatcttgtcgctagcgggagtaatcctcaccaactggaagaaattggcacatggggtcagtactcagaaccattgttcaccctgatcgaatcgattccggaaggtaagaaagtcattctggtaggagaagcggggggcggcatcaatattgcactggccgcggagaaatatccggagaaagtgagcgctctcgtctttgtgaatggtcttatgcccgatatctcgcacagtccagcgttcgtggtaaagaaatatagcgaagttttcactgactggaaagattcgatcttcagcaattatacctacggtaacgacacggtcaccgcggttaaattgggagatcgtctgctggagaatatcttctccatgtctccgattgaagatgtagaactggcgaaacatcgtgtccgcaaaggctccttttttctgcaagacttggatcgcctgccgaactttacgtcggaagggtatggtggtattcgtcgtgtgtatgtttacggcgaagaagaccaggtttttagccgcgattttcagttatggcaaattaataattataagcctgataaagtgtactgtgtaccgggtggtgaccacaagattatgatcagccgcgtcaacgagctggcccagattctcggggaagttgcaaacattgcgtcg

SEQ ID NO: 518 - protein, 255 aa, synthetic construct
  REGION 1..255: note = Description of Artificial Sequence: Synthetic polypeptide
MSAHFILIHSICHGAWLWYKLIPLLQSAGHTVTAIDLVASGSNPHQLEEIGTWGQYSEPLFTLIESIPEGKKVILVGEAGGGINIALAAEKYPEKVSALVFVNGLMPDISHSPAFVVKKYSEVFTDWKDSIFSNYTYGNDTVTAVKLGDRLLENIFSMSPIEDVELAKHRVRKGSFFLQDLDRLPNFTSEGYGGIRRVYVYGEEDQVFSRDFQLWQINNYKPDKVYCVPGGDHKIMISRVNELAQILGEVANIAS

SEQ ID NO: 519 - DNA, 765 bp, synthetic construct
  misc_feature 1..765: note = Description of Artificial Sequence: Synthetic polynucleotide
  source 1..765: mol_type = other DNA
atgagtgcgcattttattctgatccacagtatctgccatggcgcctggctgtggtataaactgatcccgttattacagtctgcaggtcataccgttacggcgattgatcttgtcgctagcgggagtaatcctcaccaactggaagaaattggcacatggggtcagtactcagaaccattgttcaccctgatcgaatcgattccggaaggtaagaaagtcattctggtaggagaagcggggggcggcatcaatattgcactggccgcggagaaatatccggagaaagtgagcgctctcgtctttgtgaacggtcttatgcccgatatctcgcacagtccagcgttcgtggtaaaggtttatagcgaagttttcactgactggaaagattcgatcttcagcaattatacctacggtaacgacacggtcaccgcggttaaattgggagatcgtctgctggagaatatcttctccatgtctccgattgaagatgtagaactggcgaaacatcgtgtccgcaaaggctccttttttctgcaagacttggatcgcctgccgaactttacgtcggaagggtatggtggtattcgtcgtgtgtatgtttacggcgaagaagaccaggtttttagccgcgattttcagttatggcaaattaataattataagcctgataaagtgtactgtgtaccgggtggtgaccacaagattatgatcagccgcgtcaacgagctggcccagattctcggggaagttgcaaactctgcgtcg

SEQ ID NO: 520 - protein, 255 aa, synthetic construct
  REGION 1..255: note = Description of Artificial Sequence: Synthetic polypeptide
MSAHFILIHSICHGAWLWYKLIPLLQSAGHTVTAIDLVASGSNPHQLEEIGTWGQYSEPLFTLIESIPEGKKVILVGEAGGGINIALAAEKYPEKVSALVFVNGLMPDISHSPAFVVKVYSEVFTDWKDSIFSNYTYGNDTVTAVKLGDRLLENIFSMSPIEDVELAKHRVRKGSFFLQDLDRLPNFTSEGYGGIRRVYVYGEEDQVFSRDFQLWQINNYKPDKVYCVPGGDHKIMISRVNELAQILGEVANSAS

SEQ ID NO: 521 - DNA, 765 bp, synthetic construct
  misc_feature 1..765: note = Description of Artificial Sequence: Synthetic polynucleotide
  source 1..765: mol_type = other DNA
atgagtgcgcattttattctgatccacagtatctgccatggcgcctggctgtggtataaactgatcccgttattacagtctgcaggtcataccgttacggcgattgatcttgtcgctagcgggagtaatcctcaccaactggaagaaattggcacatggggtcagtactcagaaccattgttcaccctgatcgaatcgattccggaaggtaagaaagtcattctggtaggagaagcggggggcggcatcaatattgcactggccgcggagaaatatccggagaaagtgagcgctctcgtctttgtgaacggtcttatgcccgatatctcgcacagtccagcgttcgtggtaaagaaatatagcagtgttttcactgactggaaagattcgatcttcagcaattatacctacggtaacgacacggtcaccgcggttaaattgggagatcgtctgctggagaatatcttctccatgtctccgattgaagatgtagaactggcgaaacatcgtgtccgcaaaggctccttttttctgcaagacttggatcgcctgccgaactttacgtcggaagggtatggtggtattcgtcgtgtgtatgtttacggcgaagaagaccaggtttttagccgcgattttcagttatggcaaattaataattataagcctgataaagtgtactgtgtaccgggtggtgaccacaagattatgatcagccgcgtcaacgagctggcccagattctcggggaagttgcaaactctgcgtcg

SEQ ID NO: 522 - protein, 255 aa, synthetic construct
  REGION 1..255: note = Description of Artificial Sequence: Synthetic polypeptide
MSAHFILIHSICHGAWLWYKLIPLLQSAGHTVTAIDLVASGSNPHQLEEIGTWGQYSEPLFTLIESIPEGKKVILVGEAGGGINIALAAEKYPEKVSALVFVNGLMPDISHSPAFVVKKYSSVFTDWKDSIFSNYTYGNDTVTAVKLGDRLLENIFSMSPIEDVELAKHRVRKGSFFLQDLDRLPNFTSEGYGGIRRVYVYGEEDQVFSRDFQLWQINNYKPDKVYCVPGGDHKIMISRVNELAQILGEVANSAS

SEQ ID NO: 523 - DNA, 765 bp, synthetic construct
  misc_feature 1..765: note = Description of Artificial Sequence: Synthetic polynucleotide
  source 1..765: mol_type = other DNA
atgagtgcgcattttattctgatccacagtatctgccatggcgcctggctgtggtataaactgatcccgttattacagtctgcaggtcataccgttacggcgattgatcttgtcgctagcgggagtaatcctcaccaactggaagaaattggcacatggggtcagtactcagaaccattgttcaccctgatcgaatcgattccggaaggtaagaaagtcattctggtaggagaagcggggggcggcatcaatattgcactggccgcggagaaatatccggagaaagtgagcgctctcgtctttgtgaacggtcttatgcccgatatctcgcacagtccagcgttcgtggtaaagaaatatagcgaagttttcactgactggaaagattcgatcttcagcaattatacctacggtaacgacacggtcaccgcggttaaattgggagatcgtctgctggagaatatcttctccatgtctccgattgaagatgtagaactggcgaaacatcgtgtccgcaaaggctccttttttctgcaagacttggatcgcctgccgaactttacgtcggaagggtatggtggtattcgtcgtgtgtatgtttacggcgaagaagaccaggtttttctgcgcgattttcagttatggcaaattaataattataagcctgataaagtgtactgtgtaccgggtggtgaccacaagattatgatcagccgcgtcaacgagctggcccagattctcggggaagttgcaaactctgcgtcg

SEQ ID NO: 524 - protein, 255 aa, synthetic construct
  REGION 1..255: note = Description of Artificial Sequence: Synthetic polypeptide
MSAHFILIHSICHGAWLWYKLIPLLQSAGHTVTAIDLVASGSNPHQLEEIGTWGQYSEPLFTLIESIPEGKKVILVGEAGGGINIALAAEKYPEKVSALVFVNGLMPDISHSPAFVVKKYSEVFTDWKDSIFSNYTYGNDTVTAVKLGDRLLENIFSMSPIEDVELAKHRVRKGSFFLQDLDRLPNFTSEGYGGIRRVYVYGEEDQVFLRDFQLWQINNYKPDKVYCVPGGDHKIMISRVNELAQILGEVANSAS

SEQ ID NO: 525 - DNA, 765 bp, synthetic construct
  misc_feature 1..765: note = Description of Artificial Sequence: Synthetic polynucleotide
  source 1..765: mol_type = other DNA
atgagtgcgcattttattctgatccacagtatctgccatggcgcctggctgtggtataaactgatcccgttattacagtctgcaggtcataccgttacggcgattgatcttgtcgctagcgggagtaatcctcaccaactggaagaaattggcacatggggtcagtactcagaaccattgttcaccctgatcgaatcgattccggaaggtaagaaagtcattctggtaggagaagcggggggcggcgtgaatattgcactggccgcggagaaatatccggagaaagtgagcgctctcgtctttgtgaacggtcttatgcccgatatctcgcacagtccagcgttcgtggtaaagaaatatagcgaagttttcactgactggaaagattcgatcttcagcaattatacctacggtaacgacacggtcaccgcggttaaattgggagatcgtctgctggagaatatcttctccatgtctccgattgaagatgtagaactggcgaaacatcgtgtccgcaaaggctccttttttctgcaagacttggatcgcctgccgaactttacgtcggaagggtatggtggtattcgtcgtgtgtatgtttacggcgaagaagaccaggtttttagccgcgattttcagttatggcaaattaataattataagcctgataaagtgtactgtgtaccgggtggtgaccacaagattatgatcagccgcgtcaacgagctggcccagattctcggggaagttgcaaactctgcgtcg

SEQ ID NO: 526 - protein, 255 aa, synthetic construct
  REGION 1..255: note = Description of Artificial Sequence: Synthetic polypeptide
MSAHFILIHSICHGAWLWYKLIPLLQSAGHTVTAIDLVASGSNPHQLEEIGTWGQYSEPLFTLIESIPEGKKVILVGEAGGGVNIALAAEKYPEKVSALVFVNGLMPDISHSPAFVVKKYSEVFTDWKDSIFSNYTYGNDTVTAVKLGDRLLENIFSMSPIEDVELAKHRVRKGSFFLQDLDRLPNFTSEGYGGIRRVYVYGEEDQVFSRDFQLWQINNYKPDKVYCVPGGDHKIMISRVNELAQILGEVANSAS

SEQ ID NO: 527 - DNA, 765 bp, synthetic construct
  misc_feature 1..765: note = Description of Artificial Sequence: Synthetic polynucleotide
  source 1..765: mol_type = other DNA
atgagtgcgcattttattctgatccacagtatctgccatggcgcctggctgtggtataaactgatcccgttattacagtctgcaggtcataccgttacggcgattgatcttgtcgctagcgggagtaatcctcaccaactggaagaaattggcacatggggtcagtactcagaaccattgttcaccctgatcgaatcgattccggaaggtaagaaagtcattctggtaggagaaggggggggcggcatcaatattgcactggccgcggagaaatatccggagaaagtgagcgctctcgtctttgtgaacggtcttatgcccgatatctcgcacagtccagcgttcgtggtaaagaaatatagcgaagttttcactgactggaaagattcgatcttcagcaattatacctacggtaacgacacggtcaccgcggttaaattgggagatcgtctgctggagaatatcttctccatgtctccgattgaagatgtagaactggcgaaacatcgtgtccgcaaaggctccttttttctgcaagacttggatcgcctgccgaactttacgtcggaagggtatggtggtattcgtcgtgtgtatgtttacggcgaagaagaccaggtttttagccgcgattttcagttatggcaaattaataattataagcctgataaagtgtactgtgtaccgggtggtgaccacaagattatgatcagccgcgtcaacgagctggcccagattctcggggaagttgcaaactctgcgtcg

SEQ ID NO: 528 - protein, 255 aa, synthetic construct
  REGION 1..255: note = Description of Artificial Sequence: Synthetic polypeptide
MSAHFILIHSICHGAWLWYKLIPLLQSAGHTVTAIDLVASGSNPHQLEEIGTWGQYSEPLFTLIESIPEGKKVILVGEGGGGINIALAAEKYPEKVSALVFVNGLMPDISHSPAFVVKKYSEVFTDWKDSIFSNYTYGNDTVTAVKLGDRLLENIFSMSPIEDVELAKHRVRKGSFFLQDLDRLPNFTSEGYGGIRRVYVYGEEDQVFSRDFQLWQINNYKPDKVYCVPGGDHKIMISRVNELAQILGEVANSAS

SEQ ID NO: 529 - DNA, 765 bp, synthetic construct
  misc_feature 1..765: note = Description of Artificial Sequence: Synthetic polynucleotide
  source 1..765: mol_type = other DNA
atgagtgcgcattttattctgcttcacagtatctgccatggcgcctggctgtggtataaactgatcccgttattacagtctgcaggtcataccgttacggcgattgatcttgtcgctagcgggagtaatcctcaccaactggaagaaattggcacatggggtcagtactcagaaccattgttcaccctgatcgaatcgattccggaaggtaagaaagtcattctggtaggagaagcggggggcggcatcaatattgcactggccgcggagaaatatccggagaaagtgagcgctctcgtctttgtgaacggtcttatgcccgatatctcgcacagtccagcgttcgtggtaaagaaatatagcgaagttttcactgactggaaagattcgatcttcagcaattatacctacggtaacgacacggtcaccgcggttaaattgggagatcgtctgctggagaatatcttctccatgtctccgattgaagatgtagaactggcgaaacatcgtgtccgcaaaggctccttttttctgcaagacttggatcgcctgccgaactttacgtcggaagggtatggtggtattcgtcgtgtgtatgtttacggcgaagaagaccaggtttttagccgcgattttcagttatggcaaattaataattataagcctgataaagtgtactgtgtaccgggtggtgaccacaagattatgatcagccgcgtcaacgagctggcccagattctcggggaagttgcaaactctgcgtcg

SEQ ID NO: 530 - protein, 255 aa, synthetic construct
  REGION 1..255: note = Description of Artificial Sequence: Synthetic polypeptide
MSAHFILLHSICHGAWLWYKLIPLLQSAGHTVTAIDLVASGSNPHQLEEIGTWGQYSEPLFTLIESIPEGKKVILVGEAGGGINIALAAEKYPEKVSALVFVNGLMPDISHSPAFVVKKYSEVFTDWKDSIFSNYTYGNDTVTAVKLGDRLLENIFSMSPIEDVELAKHRVRKGSFFLQDLDRLPNFTSEGYGGIRRVYVYGEEDQVFSRDFQLWQINNYKPDKVYCVPGGDHKIMISRVNELAQILGEVANSAS

SEQ ID NO: 531 - DNA, 765 bp, synthetic construct
  misc_feature 1..765: note = Description of Artificial Sequence: Synthetic polynucleotide
  source 1..765: mol_type = other DNA
atgagtgcgcattttattctgatccacagtatctgccatggcgcctggctgtggtataaactgatcccgttattacagtctgcaggtcataccgttacggcgattgatcttgtcgctagcgggagtaatcctcaccaactggaagaaattggcacatggggtcagtactcagaaccattgttcaccctgatcgaatcgattccggaaggtaagaaagtcattctggtaggagaagcggggggcggcatcaatattgcactggccgcggagaaatatccggagaaagtgagcgctctcgtctttgtgaacggtcttatgcccgatatctcgcacagtccagcgttcgtggtaaagaaatatagcgaagttttcactgactggaaagattcgatcttctgtaattatacctacggtaacgacacggtcaccgcggttaaattgggagatcgtctgctggagaatatcttctccatgtctccgattgaagatgtagaactggcgaaacatcgtgtccgcaaaggctccttttttctgcaagacttggatcgcctgccgaactttacgtcggaagggtatggtggtattcgtcgtgtgtatgtttacggcgaagaagaccaggtttttagccgcgattttcagttatggcaaattaataattataagcctgataaagtgtactgtgtaccgggtggtgaccacaagattatgatcagccgcgtcaacgagctggcccagattctcggggaagttgcaaactctgcgtcg

SEQ ID NO: 532 - protein, 255 aa, synthetic construct
  REGION 1..255: note = Description of Artificial Sequence: Synthetic polypeptide
MSAHFILIHSICHGAWLWYKLIPLLQSAGHTVTAIDLVASGSNPHQLEEIGTWGQYSEPLFTLIESIPEGKKVILVGEAGGGINIALAAEKYPEKVSALVFVNGLMPDISHSPAFVVKKYSEVFTDWKDSIFCNYTYGNDTVTAVKLGDRLLENIFSMSPIEDVELAKHRVRKGSFFLQDLDRLPNFTSEGYGGIRRVYVYGEEDQVFSRDFQLWQINNYKPDKVYCVPGGDHKIMISRVNELAQILGEVANSAS

SEQ ID NO: 533 - DNA, 765 bp, synthetic construct
  misc_feature 1..765: note = Description of Artificial Sequence: Synthetic polynucleotide
  source 1..765: mol_type = other DNA
atgagtgcgcattttattctgatccacagtatctgccatggcgcctggctgtggtataaactgatcccgttattacagtctgcaggtcataccgttacggcgattgatcttgtcgctagcgggagtaatcctcaccaactggaagaaattggcacatggggtcagtactcagaaccattgttcaccctgatcgaatcgattccggaaggtaagaaagtcattctggtaggagaagcggggggcggcatcaatattgcactggccgcggagaaatatccggagaaagtgagcgctctcgtctttgtgaacggtcttatgcccgatatctcgcacagtccagcgttcgtggtaaagaaatatagcgaagttttcactgactggaaagattcgatcttcagcaattatacctacggtaacgacacggtcaccgcggttaaattgggagatcgtctgctggagaatatcttctccatgtctccgattgaagatgtagaactggcgaaacatcgtgtccgcaaaggctccttttttctgcaagacttggatcgcctgccgaactttacgtcggaagggtatggtggtattcgtcgtgtgtatgtttacggcgaagaagaccaggtttttagccgcgattttcagttatggcaaattaataattataagcctgataaagtgtactgtgtaccgggtggtgaccacaagattatgatcagccgcgtcaacgagctggcccagattctcggggaagttgcaaactctgcgagg

SEQ ID NO: 534 - protein, 255 aa, synthetic construct
  REGION 1..255: note = Description of Artificial Sequence: Synthetic polypeptide
MSAHFILIHSICHGAWLWYKLIPLLQSAGHTVTAIDLVASGSNPHQLEEIGTWGQYSEPLFTLIESIPEGKKVILVGEAGGGINIALAAEKYPEKVSALVFVNGLMPDISHSPAFVVKKYSEVFTDWKDSIFSNYTYGNDTVTAVKLGDRLLENIFSMSPIEDVELAKHRVRKGSFFLQDLDRLPNFTSEGYGGIRRVYVYGEEDQVFSRDFQLWQINNYKPDKVYCVPGGDHKIMISRVNELAQILGEVANSAR

SEQ ID NO: 535 - DNA, 765 bp, synthetic construct
  misc_feature 1..765: note = Description of Artificial Sequence: Synthetic polynucleotide
  source 1..765: mol_type = other DNA
atgagtgcgcattttattctgatccacagtatctgccatggcgcctggctgtggtataaactgatcccgttattacagtctgcaggtcataccgttacggcgattgatcttgtcgctagcgggagtaatcctcaccaactggaagaaattggcacatggggtcagtactcagaaccattgttcaccctgatcgaatcgattccggaaggtaagaaagtcattctggtaggagaagcggggggcggcatcaatattgcactggccgcggagaaatatccggagaaagtgagcgctctcgtctttgtgaacggtcttatgcccgatatctcgcacagtccagcgttcgtggtaaagaaatatagcgaagttttcactgactggaaagattcgatcttcagcaattatacctacggtaacgacgtggtcaccgcggttaaattgggagatcgtctgctggagaatatcttctccatgtctccgattgaagatgtagaactggcgaaacatcgtgtccgcaaaggctccttttttctgcaagacttggatcgcctgccgaactttacgtcggaagggtatggtggtattcgtcgtgtgtatgtttacggcgaagaagaccaggtttttagccgcgattttcagttatggcaaattaataattataagcctgataaagtgtactgtgtaccgggtggtgaccacaagattatgatcagccgcgtcaacgagctggcccagattctcggggaagttgcaaactctgcgtcg

SEQ ID NO: 536 - protein, 255 aa, synthetic construct
  REGION 1..255: note = Description of Artificial Sequence: Synthetic polypeptide
MSAHFILIHSICHGAWLWYKLIPLLQSAGHTVTAIDLVASGSNPHQLEEIGTWGQYSEPLFTLIESIPEGKKVILVGEAGGGINIALAAEKYPEKVSALVFVNGLMPDISHSPAFVVKKYSEVFTDWKDSIFSNYTYGNDVVTAVKLGDRLLENIFSMSPIEDVELAKHRVRKGSFFLQDLDRLPNFTSEGYGGIRRVYVYGEEDQVFSRDFQLWQINNYKPDKVYCVPGGDHKIMISRVNELAQILGEVANSAS

SEQ ID NO: 537 - DNA, 765 bp, synthetic construct
  misc_feature 1..765: note = Description of Artificial Sequence: Synthetic polynucleotide
  source 1..765: mol_type = other DNA
atgttggcgcattttattctgatccacagtatctgccatggcgcctggctgtggtataaactgatcccgttattacagtctgcaggtcataccgttacggcgattgatcttgtcgctagcgggagtaatcctcaccaactggaagaaattggcacatggggtcagtactcagaaccattgttcaccctgatcgaatcgattccggaaggtaagaaagtcattctggtaggagaagcggggggcggcatcaatattgcactggccgcggagaaatatccggagaaagtgagcgctctcgtctttgtgaacggtcttatgcccgatatctcgcacagtccagcgttcgtggtaaagaaatatagcgaagttttcactgactggaaagattcgatcttcagcaattatacctacggtaacgacacggtcaccgcggttaaattgggagatcgtctgctggagaatatcttctccatgtctccgattgaagatgtagaactggcgaaacatcgtgtccgcaaaggctccttttttctgcaagacttggatcgcctgccgaactttacgtcggaagggtatggtggtattcgtcgtgtgtatgtttacggcgaagaagaccaggtttttagccgcgattttcagttatggcaaattaataattataagcctgataaagtgtactgtgtaccgggtggtgaccacaagattatgatcagccgcgtcaacgagctggcccagattctcggggaagttgcaaactctgcgtcg

SEQ ID NO: 538 - protein, 255 aa, synthetic construct
  REGION 1..255: note = Description of Artificial Sequence: Synthetic polypeptide
MLAHFILIHSICHGAWLWYKLIPLLQSAGHTVTAIDLVASGSNPHQLEEIGTWGQYSEPLFTLIESIPEGKKVILVGEAGGGINIALAAEKYPEKVSALVFVNGLMPDISHSPAFVVKKYSEVFTDWKDSIFSNYTYGNDTVTAVKLGDRLLENIFSMSPIEDVELAKHRVRKGSFFLQDLDRLPNFTSEGYGGIRRVYVYGEEDQVFSRDFQLWQINNYKPDKVYCVPGGDHKIMISRVNELAQILGEVANSAS

SEQ ID NO: 539 - DNA, 765 bp, synthetic construct
  misc_feature 1..765: note = Description of Artificial Sequence: Synthetic polynucleotide
  source 1..765: mol_type = other DNA
atgacggcgcattttattctgatccacagtatctgccatggcgcctggctgtggtataaactgatcccgttattacagtctgcaggtcataccgttacggcgattgatcttgtcgctagcgggagtaatcctcaccaactggaagaaattggcacatggggtcagtactcagaaccattgttcaccctgatcgaatcgattccggaaggtaagaaagtcattctggtaggagaagcggggggcggcatcaatattgcactggccgcggagaaatatccggagaaagtgagcgctctcgtctttgtgaacggtcttatgcccgatatctcgcacagtccagcgttcgtggtaaagaaatatagcgaagttttcactgactggaaagattcgatcttcagcaattatacctacggtaacgacacggtcaccgcggttaaattgggagatcgtctgctggagaatatcttctccatgtctccgattgaagatgtagaactggcgaaacatcgtgtccgcaaaggctccttttttctgcaagacttggatcgcctgccgaactttacgtcggaagggtatggtggtattcgtcgtgtgtatgtttacggcgaagaagaccaggtttttagccgcgattttcagttatggcaaattaataattataagcctgataaagtgtactgtgtaccgggtggtgaccacaagattatgatcagccgcgtcaacgagctggcccagattctcggggaagttgcaaactctgcgtcg

SEQ ID NO: 540 - protein, 255 aa, synthetic construct
  REGION 1..255: note = Description of Artificial Sequence: Synthetic polypeptide
MTAHFILIHSICHGAWLWYKLIPLLQSAGHTVTAIDLVASGSNPHQLEEIGTWGQYSEPLFTLIESIPEGKKVILVGEAGGGINIALAAEKYPEKVSALVFVNGLMPDISHSPAFVVKKYSEVFTDWKDSIFSNYTYGNDTVTAVKLGDRLLENIFSMSPIEDVELAKHRVRKGSFFLQDLDRLPNFTSEGYGGIRRVYVYGEEDQVFSRDFQLWQINNYKPDKVYCVPGGDHKIMISRVNELAQILGEVANSAS

SEQ ID NO: 541 - DNA, 765 bp, synthetic construct
  misc_feature 1..765: note = Description of Artificial Sequence: Synthetic polynucleotide
  source 1..765: mol_type = other DNA
atgagtgcgcattttattctgatccacagtatctgccatggcgcctggctgtggtataaactgatcccgttattacagtctgcaggtcataccgttacggcgattgatcttgtcgctagcgggagtaatcctcaccaactggaagaaattggcacatggggtcagtactcagaaccattgttcaccctgatcgaatcgattccggaaggtaagaaagtcattctggtaggagaagcggggggcggcatcaatattgcactggccgcggagaaatatccggagaaagtgagcgctctcgtctttgtgaacggtcttatgcccgatatctcgcacagtccagcgttcgtggtaaagaaatatagcgaagttttcactgactggaaagattcgatcttcagcaattatacctacggtaacgacacggtcaccgcggttaaattgggagatcgtctgctggagaatatcttctccatgtctccgattgaagatgtagaactggcgaaacatcgtgtccgcaaaggctccttttttctgtctgacttggatcgcctgccgaactttacgtcggaagggtatggtggtattcgtcgtgtgtatgtttacggcgaagaagaccaggtttttagccgcgattttcagttatggcaaattaataattataagcctgataaagtgtactgtgtaccgggtggtgaccacaagattatgatcagccgcgtcaacgagctggcccagattctcggggaagttgcaaactctgcgtcg

SEQ ID NO: 542 - protein, 255 aa, synthetic construct
  REGION 1..255: note = Description of Artificial Sequence: Synthetic polypeptide
MSAHFILIHSICHGAWLWYKLIPLLQSAGHTVTAIDLVASGSNPHQLEEIGTWGQYSEPLFTLIESIPEGKKVILVGEAGGGINIALAAEKYPEKVSALVFVNGLMPDISHSPAFVVKKYSEVFTDWKDSIFSNYTYGNDTVTAVKLGDRLLENIFSMSPIEDVELAKHRVRKGSFFLSDLDRLPNFTSEGYGGIRRVYVYGEEDQVFSRDFQLWQINNYKPDKVYCVPGGDHKIMISRVNELAQILGEVANSAS

SEQ ID NO: 543 - DNA, 765 bp, synthetic construct
  misc_feature 1..765: note = Description of Artificial Sequence: Synthetic polynucleotide
  source 1..765: mol_type = other DNA
atgagtgcgcattttattctgatccacagtatctgccatggcgcctggctgtggtataaactgatcccgttattacagtctgcaggtcataccgttacggcgattgatcttgtcgctagcgggagtaatcctcaccaactggaagaaattggcacatggggtcagtactcagaaccattgttcaccctgatcgaatcgattccggaaggtaagaaagtcattctggtaggagaagcggggggcggcatcaatattgcactggccgcggagaaatatccggagaaagtgagcgctctcgtctttgtgaacggtcttatgcccgatatctcgcacagtccagcgttcgtggtaaagaaatatagcggggttttcactgactggaaagattcgatcttcagcaattatacctacggtaacgacacggtcaccgcggttaaattgggagatcgtctgctggagaatatcttctccatgtctccgattgaagatgtagaactggcgaaacatcgtgtccgcaaaggctccttttttctgcaagacttggatcgcctgccgaactttacgtcggaagggtatggtggtattcgtcgtgtgtatgtttacggcgaagaagaccaggtttttagccgcgattttcagttatggcaaattaataattataagcctgataaagtgtactgtgtaccgggtggtgaccacaagattatgatcagccgcgtcaacgagctggcccagattctcggggaagttgcaaactctgcgtcg

SEQ ID NO: 544 - protein, 255 aa, synthetic construct
  REGION 1..255: note = Description of Artificial Sequence: Synthetic polypeptide
MSAHFILIHSICHGAWLWYKLIPLLQSAGHTVTAIDLVASGSNPHQLEEIGTWGQYSEPLFTLIESIPEGKKVILVGEAGGGINIALAAEKYPEKVSALVFVNGLMPDISHSPAFVVKKYSGVFTDWKDSIFSNYTYGNDTVTAVKLGDRLLENIFSMSPIEDVELAKHRVRKGSFFLQDLDRLPNFTSEGYGGIRRVYVYGEEDQVFSRDFQLWQINNYKPDKVYCVPGGDHKIMISRVNELAQILGEVANSAS

SEQ ID NO: 545 - DNA, 765 bp, synthetic construct
  misc_feature 1..765: note = Description of Artificial Sequence: Synthetic polynucleotide
  source 1..765: mol_type = other DNA
atgagtgcgcattttattctgatccacagtatctgccatggcgcctggctgtggtataaactgatcccgttattacagtctgcaggtcataccgttacggcgattgatcttgtcgctagcgggagtaatcctcaccaactggaagaaattggcacatggggtcagtactcagaaccattgttcaccctgatcgaatcgattccggaaggtaagaaagtcattctggtaggagaagcggggggcggcatcaatattgcactggccgcggagaaatatccggagaaagtgagcgctctcgtctttgtgaacggtcttatgcccgatatctcgcacagtccagcgttcgtggtaaagaaatatagcgaagttttcactgactggaaagattcgatcttcagcaattatacctacggtaacgacacggtcaccgcggttaaattgggagatcgtctgctggagaatatcttctccatgtctccgattgaagatgtagaactggcgaaacatcgtgtccgctgtggctccttttttctgcaagacttggatcgcctgccgaactttacgtcggaagggtatggtggtattcgtcgtgtgtatgtttacggcgaagaagaccaggtttttagccgcgattttcagttatggcaaattaataattataagcctgataaagtgtactgtgtaccgggtggtgaccacaagattatgatcagccgcgtcaacgagctggcccagattctcggggaagttgcaaactctgcgtcg

SEQ ID NO: 546 - protein, 255 aa, synthetic construct
  REGION 1..255: note = Description of Artificial Sequence: Synthetic polypeptide
MSAHFILIHSICHGAWLWYKLIPLLQSAGHTVTAIDLVASGSNPHQLEEIGTWGQYSEPLFTLIESIPEGKKVILVGEAGGGINIALAAEKYPEKVSALVFVNGLMPDISHSPAFVVKKYSEVFTDWKDSIFSNYTYGNDTVTAVKLGDRLLENIFSMSPIEDVELAKHRVRCGSFFLQDLDRLPNFTSEGYGGIRRVYVYGEEDQVFSRDFQLWQINNYKPDKVYCVPGGDHKIMISRVNELAQILGEVANSAS

SEQ ID NO: 547 - DNA, 765 bp, synthetic construct
  misc_feature 1..765: note = Description of Artificial Sequence: Synthetic polynucleotide
  source 1..765: mol_type = other DNA
atgagtgcgcattttattctgatccacagtatctgccatggcgcctggctgtggtataaactgatcccgttattacagtctgcaggtcataccgttacggcgattgatcttgtcgctagcgggagtaatcctcaccaactggaagaaattggcacatggggtcagtactcagaaccattgttcaccctgatcgaatcgattccggaaggtaagaaagtcattctggtaggagaagcggggggcggcatcaatattgcactggccgcggagaaatatccggagaaagtgagcgctctcgtctttgtgaacggtcttatgcccgatatctcgcacagtccagcgttcgtggtaaagaaatatagcgaagttttcactgactggaaagattcgatcttcagcaattatacctacggtaacgacacggtcaccgcggttaaattgggagatcgtctgctggagaatatcttctccatgtctccgattgaagatgtagaactggcgaaacatcgtgtccgcaaaggctccttttttctgcaagacttggttcgcctgccgaactttacgtcggaagggtatggtggtattcgtcgtgtgtatgtttacggcgaagaagaccaggtttttagccgcgattttcagttatggcaaattaataattataagcctgataaagtgtactgtgtaccgggtggtgaccacaagattatgatcagccgcgtcaacgagctggcccagattctcggggaagttgcaaactctgcgtcg

SEQ ID NO: 548 - protein, 255 aa, synthetic construct
  REGION 1..255: note = Description of Artificial Sequence: Synthetic polypeptide
MSAHFILIHSICHGAWLWYKLIPLLQSAGHTVTAIDLVASGSNPHQLEEIGTWGQYSEPLFTLIESIPEGKKVILVGEAGGGINIALAAEKYPEKVSALVFVNGLMPDISHSPAFVVKKYSEVFTDWKDSIFSNYTYGNDTVTAVKLGDRLLENIFSMSPIEDVELAKHRVRKGSFFLQDLVRLPNFTSEGYGGIRRVYVYGEEDQVFSRDFQLWQINNYKPDKVYCVPGGDHKIMISRVNELAQILGEVANSAS

SEQ ID NO: 549 - DNA, 765 bp, synthetic construct
  misc_feature 1..765: note = Description of Artificial Sequence: Synthetic polynucleotide
  source 1..765: mol_type = other DNA
atgagtgcgcattttattctgatccacagtatctgccatggcgcctggctgtggtataaactgatcccgttattacagtctgcaggtcataccgttacggcgattgatcttgtcgctagcgggagtaatcctcaccaactggaagaaattggcacatggggtcagtactcagaaccattgttcaccctgatcgaatcgattccggaaggtaagaaagtcattctggtaggagaagcggggggcggcatcaatattgcactggccgcggagaaatatccggagaaagtgagcgctctcgtctttgtgaacggtcttatgcccgatatctcgcacagtccagcgttcgtggtaaagaaatatagcgaagttttcactgactggaaagattcgatcttcagcaattatacctacggtaacgacacggtcaccgcggttaaattgggagatcgtctgctggagaatatcttctccatgtctccgattgaagatgtagaactggcgaaacatcgtgtccgcaaaggctccttttttctgcaagacttggatcgcctgccgaactttacgtcggaagggtatggtggtattcgtcgtgtgtatgtttacggcgaagaagacttggtttttagccgcgattttcagttatggcaaattaataattataagcctgataaagtgtactgtgtaccgggtggtgaccacaagattatgatcagccgcgtcaacgagctggcccagattctcggggaagttgcaaactctgcgtcg

SEQ ID NO: 550 - protein, 255 aa, synthetic construct
  REGION 1..255: note = Description of Artificial Sequence: Synthetic polypeptide
MSAHFILIHSICHGAWLWYKLIPLLQSAGHTVTAIDLVASGSNPHQLEEIGTWGQYSEPLFTLIESIPEGKKVILVGEAGGGINIALAAEKYPEKVSALVFVNGLMPDISHSPAFVVKKYSEVFTDWKDSIFSNYTYGNDTVTAVKLGDRLLENIFSMSPIEDVELAKHRVRKGSFFLQDLDRLPNFTSEGYGGIRRVYVYGEEDLVFSRDFQLWQINNYKPDKVYCVPGGDHKIMISRVNELAQILGEVANSAS

SEQ ID NO: 551 - DNA, 765 bp, synthetic construct
  misc_feature 1..765: note = Description of Artificial Sequence: Synthetic polynucleotide
  source 1..765: mol_type = other DNA
atgagtgcgcattttattctgatccacagtatctgccatggcgcctggctgtggtataaactgatcccgttattacagtctgcaggtcataccgttacggcgattgatcttgtcgctagcgggagtaatcctcaccaactggaagaaattggcacatggggtcagtactcagaaccattgttcaccctgatcgaatcgattccggaaggtaagaaagtcattctggtaggagaagcggggggcggcatcaatattgcactggccgcggagaaatatccggagaaagtgagcgctctcgtctttgtgaacggtcttatgcccgatatctcgcacagtccagcgttcgtggtaaagaaatatagcgaagttttcactgactggaaagattcgatcttcagcaattatacctacggtaacgacacggtcaccgcggttaaattgggagatcgtctgctggagaatatcttctccatgtctccgattgaagatgtagaactggcgaaacatcgtgtccgcaaaggctccttttttctgcaagacttggatcgcctgccgaactttacgtcggaagggtatggtggtattcgtcgtgtgtatgtttacggcgaagaagaccaggtttttagccgcgattttgtgttatggcaaattaataattataagcctgataaagtgtactgtgtaccgggtggtgaccacaagattatgatcagccgcgtcaacgagctggcccagattctcggggaagttgcaaactctgcgtcg

SEQ ID NO: 552 - protein, 255 aa, synthetic construct
  REGION 1..255: note = Description of Artificial Sequence: Synthetic polypeptide
MSAHFILIHSICHGAWLWYKLIPLLQSAGHTVTAIDLVASGSNPHQLEEIGTWGQYSEPLFTLIESIPEGKKVILVGEAGGGINIALAAEKYPEKVSALVFVNGLMPDISHSPAFVVKKYSEVFTDWKDSIFSNYTYGNDTVTAVKLGDRLLENIFSMSPIEDVELAKHRVRKGSFFLQDLDRLPNFTSEGYGGIRRVYVYGEEDQVFSRDFVLWQINNYKPDKVYCVPGGDHKIMISRVNELAQILGEVANSAS

SEQ ID NO: 553 - DNA, 765 bp, synthetic construct
  misc_feature 1..765: note = Description of Artificial Sequence: Synthetic polynucleotide
  source 1..765: mol_type = other DNA
atgagtgcgcattttattctgatccacagtatctgccatggcgcctggctgtggtataaactgatcccgttattacagtctgcaggtcataccgttacggcgattgatcttgtcgctagcgggagtaatcctcaccaactggaagaaattggcacatggggtcagtactcagaaccattgttcaccctgatcgaatcgattccggaaggtaagaaagtcattctggtaggagaagcggggggcggcatcaatattgcactggccgcggagaaatatccggagaaagtgagcgctctcgtctttgtgaacggtcttatgcccgatatctcgcacagtccagcgttcgtggtaaagaaatatagcgaagttttcactgactggaaagattcgatcttcagcaattatacctacggtaacgacacggtcaccgcggttaaattgggagatcgtgttctggagaatatcttctccatgtctccgattgaagatgtagaactggcgaaacatcgtgtccgcaaaggctccttttttctgcaagacttggatcgcctgccgaactttacgtcggaagggtatggtggtattcgtcgtgtgtatgtttacggcgaagaagaccaggtttttagccgcgattttcagttatggcaaattaataattataagcctgataaagtgtactgtgtaccgggtggtgaccacaagattatgatcagccgcgtcaacgagctggcccagattctcggggaagttgcaaactctgcgtcg

SEQ ID NO: 554 - protein, 255 aa, synthetic construct
  REGION 1..255: note = Description of Artificial Sequence: Synthetic polypeptide
MSAHFILIHSICHGAWLWYKLIPLLQSAGHTVTAIDLVASGSNPHQLEEIGTWGQYSEPLFTLIESIPEGKKVILVGEAGGGINIALAAEKYPEKVSALVFVNGLMPDISHSPAFVVKKYSEVFTDWKDSIFSNYTYGNDTVTAVKLGDRVLENIFSMSPIEDVELAKHRVRKGSFFLQDLDRLPNFTSEGYGGIRRVYVYGEEDQVFSRDFQLWQINNYKPDKVYCVPGGDHKIMISRVNELAQILGEVANSAS

SEQ ID NO: 555 - DNA, 765 bp, synthetic construct
  misc_feature 1..765: note = Description of Artificial Sequence: Synthetic polynucleotide
  source 1..765: mol_type = other DNA
atgagtgcgcattttattctgatccacagtatctgccatggcgcctggctgtggtataaactgatcccgttattacagtctgcaggtcataccgttacggcgattgatcttgtcgctagcgggagtaatcctcaccaactggaagaaattggcacatggggtcagtactcagaaccattgttcaccctgatcgaatcgattccggaaggtaagaaagtcattctggtaggagaagcggggggcggcatcaatattgcactggccgcggagaaatatccggagaaagtgagcgctctcgtctttgtgaacggtcttatgcccgatatctcgcacagtccagcgttcgtggtaaagaaatatagcatggttttcactgactggaaagattcgatcttcagcaattatacctacggtaacgacacggtcaccgcggttaaattgggagatcgtctgctggagaatatcttctccatgtctccgattgaagatgtagaactggcgaaacatcgtgtccgcaaaggctccttttttctgcaagacttggatcgcctgccgaactttacgtcggaagggtatggtggtattcgtcgtgtgtatgtttacggcgaagaagaccaggtttttagccgcgattttcagttatggcaaattaataattataagcctgataaagtgtactgtgtaccgggtggtgaccacaagattatgatcagccgcgtcaacgagctggcccagattctcggggaagttgcaaactctgcgtcg

SEQ ID NO: 556 - protein, 255 aa, synthetic construct
  REGION 1..255: note = Description of Artificial Sequence: Synthetic polypeptide
MSAHFILIHSICHGAWLWYKLIPLLQSAGHTVTAIDLVASGSNPHQLEEIGTWGQYSEPLFTLIESIPEGKKVILVGEAGGGINIALAAEKYPEKVSALVFVNGLMPDISHSPAFVVKKYSMVFTDWKDSIFSNYTYGNDTVTAVKLGDRLLENIFSMSPIEDVELAKHRVRKGSFFLQDLDRLPNFTSEGYGGIRRVYVYGEEDQVFSRDFQLWQINNYKPDKVYCVPGGDHKIMISRVNELAQILGEVANSAS

SEQ ID NO: 557 - DNA, 765 bp, synthetic construct
  misc_feature 1..765: note = Description of Artificial Sequence: Synthetic polynucleotide
  source 1..765: mol_type = other DNA
atgagtgcgcattttattctgatccacagtatctgccatggcgcctggctgtggtataaactgatcccgttattacagtctgcaggtcataccgttacggcgattgatcttgtcgctagcgggagtaatcctcaccaactggaagaaattggcacatggggtcagtactcagaaccattgttcaccctgatcgaatcgattccggaaggtaagaaagtcattctggtaggagaagcggggggcggcatcaatattgcactggccgcggagaaatatccggagaaagtgagcgctctcgtctttgtgaacggtcttatgcccgatatctcgcacagtccagcgttcgtggtaaagaaatatagcgaagttttcactgactggaaagattcgatcttcagcaattatacctacggtaacgacacggtcaccgcggttaaattgggagatcgtctgctggagaatatcttctccatgtctccgattgaagatgtagaactggcgaaacatcgtgtccgctggggctccttttttctgcaagacttggatcgcctgccgaactttacgtcggaagggtatggtggtattcgtcgtgtgtatgtttacggcgaagaagaccaggtttttagccgcgattttcagttatggcaaattaataattataagcctgataaagtgtactgtgtaccgggtggtgaccacaagattatgatcagccgcgtcaacgagctggcccagattctcggggaagttgcaaactctgcgtcg

SEQ ID NO: 558 - protein, 255 aa, synthetic construct
  REGION 1..255: note = Description of Artificial Sequence: Synthetic polypeptide
MSAHFILIHSICHGAWLWYKLIPLLQSAGHTVTAIDLVASGSNPHQLEEIGTWGQYSEPLFTLIESIPEGKKVILVGEAGGGINIALAAEKYPEKVSALVFVNGLMPDISHSPAFVVKKYSEVFTDWKDSIFSNYTYGNDTVTAVKLGDRLLENIFSMSPIEDVELAKHRVRWGSFFLQDLDRLPNFTSEGYGGIRRVYVYGEEDQVFSRDFQLWQINNYKPDKVYCVPGGDHKIMISRVNELAQILGEVANSAS

SEQ ID NO: 559 - DNA, 765 bp, synthetic construct
  misc_feature 1..765: note = Description of Artificial Sequence: Synthetic polynucleotide
  source 1..765: mol_type = other DNA
atgagtgcgcattttattctgatccacagtatctgccatggcgcctggctgtggtataaactgatcccgttattacagtctgcaggtcataccgttacggcgattgatcttgtcgctagcgggagtaatcctcaccaactggaagaaattggcacatggggtcagtactcagaaccattgttcaccctgatcgaatcgattccggaaggtaagaaagtcattctggtaggagaagcggggggcggcatcaatattgcactggccgcggagaaatatccggagaaagtgagcgctctcgtctttgtgaacggtcttatgcccgatatctcgcacagtccagcgttcgtggtaaagaaatatagcgaagttttcactgactggaaagattcgatcttcagcaattatacctacggtaacgacacggtcaccgcggttaaattgggagatcgtctgctggagaatatcttctccatgtctccgattgaagatgtagaactggcgaaacatcgtgtccgcaaaggctccttttttctgcaagacttggatcgcctgccgaactttacgtcggaagggtatggtggtattcgtcgtgtgtatgtttacggcgaagaagaccaggtttttagccgcgattttcagttatggcaaattaataattataagcctgataaagtgtactgtgtaccgggtggtgaccacaagattatgatcagccgcgtcaacgagctggcccagattctcggggaagttgcaaactctgcgtgg

SEQ ID NO: 560 - protein, 255 aa, synthetic construct
  REGION 1..255: note = Description of Artificial Sequence: Synthetic polypeptide
MSAHFILIHSICHGAWLWYKLIPLLQSAGHTVTAIDLVASGSNPHQLEEIGTWGQYSEPLFTLIESIPEGKKVILVGEAGGGINIALAAEKYPEKVSALVFVNGLMPDISHSPAFVVKKYSEVFTDWKDSIFSNYTYGNDTVTAVKLGDRLLENIFSMSPIEDVELAKHRVRKGSFFLQDLDRLPNFTSEGYGGIRRVYVYGEEDQVFSRDFQLWQINNYKPDKVYCVPGGDHKIMISRVNELAQILGEVANSAW

SEQ ID NO: 561 - DNA, 765 bp, synthetic construct
  misc_feature 1..765: note = Description of Artificial Sequence: Synthetic polynucleotide
  source 1..765: mol_type = other DNA
atgagtgcgcattttattctgatccacagtatctgccatggcgcctggctgtggtataaactgatcccgttattacagtctgcaggtcataccgttacggcgattgatcttgtcgctagcgggagtaatcctcaccaactggaagaaattggcacatggggtcagtactcagaaccattgttcaccctgatcgaatcgattccggaaggtaagaaagtcattctggtaggagaagcggggggcggcatcaatattgcactggccgcggagaaatatccggagaaagtgagcgctctcgtctttgtgaacggtcttatgcccgatatctcgcacagtccagcgttcgtggtaaagaaatatagcgaagttttcactgactggaaagattcgatcttcagcaattatacctacggtaacgacacggtcaccgcggttaaattgggagatcgtctgctggaggcgatcttctccatgtctccgattgaagatgtagaactggcgaaacatcgtgtccgcaaaggctccttttttctgcaagacttggatcgcctgccgaactttacgtcggaagggtatggtggtattcgtcgtgtgtatgtttacggcgaagaagaccaggtttttagccgcgattttcagttatggcaaattaataattataagcctgataaagtgtactgtgtaccgggtggtgaccacaagattatgatcagccgcgtcaacgagctggcccagattctcggggaagttgcaaactctgcgtcg

SEQ ID NO: 562 - protein, 255 aa, synthetic construct
  REGION 1..255: note = Description of Artificial Sequence: Synthetic polypeptide
MSAHFILIHSICHGAWLWYKLIPLLQSAGHTVTAIDLVASGSNPHQLEEIGTWGQYSEPLFTLIESIPEGKKVILVGEAGGGINIALAAEKYPEKVSALVFVNGLMPDISHSPAFVVKKYSEVFTDWKDSIFSNYTYGNDTVTAVKLGDRLLEAIFSMSPIEDVELAKHRVRKGSFFLQDLDRLPNFTSEGYGGIRRVYVYGEEDQVFSRDFQLWQINNYKPDKVYCVPGGDHKIMISRVNELAQILGEVANSAS

SEQ ID NO: 563 - DNA, 765 bp, synthetic construct
  misc_feature 1..765: note = Description of Artificial Sequence: Synthetic polynucleotide
  source 1..765: mol_type = other DNA
atgagtgcgcattttattctgatccacagtatctgccatggcgcctggctgtggtataaactgatcccgttattacagtctgcaggtcataccgttacggcgattgatcttgtcgctagcgggagtaatcctcaccaactggaagaaattggcacatggggtcagtactcagaaccattgttcaccctgatcgaatcgattccggaaggtaagaaagtcattctggtaggagaagcggggggcggcatcaatattgcactggccgcggagaaatatccggagaaagtgagcgctctcgtctttgtgaacggtcttcttcccgatatctcgcacagtccagcgttcgtggtaaagaaatatagcgaagttttcactgactggaaagattcgatcttcagcaattatacctacggtaacgacacggtcaccgcggttaaattgggagatcgtctgctggagaatatcttctccatgtctccgattgaagatgtagaactggcgaaacatcgtgtccgcaaaggctccttttttctgcaagacttggatcgcctgccgaactttacgtcggaagggtatggtggtattcgtcgtgtgtatgtttacggcgaagaagaccaggtttttagccgcgattttcagttatggcaaattaataattataagcctgataaagtgtactgtgtaccgggtggtgaccacaagattatgatcagccgcgtcaacgagctggcccagattctcggggaagttgcaaactctgcgtcg

SEQ ID NO: 564 - protein, 255 aa, synthetic construct
  REGION 1..255: note = Description of Artificial Sequence: Synthetic polypeptide
MSAHFILIHSICHGAWLWYKLIPLLQSAGHTVTAIDLVASGSNPHQLEEIGTWGQYSEPLFTLIESIPEGKKVILVGEAGGGINIALAAEKYPEKVSALVFVNGLLPDISHSPAFVVKKYSEVFTDWKDSIFSNYTYGNDTVTAVKLGDRLLENIFSMSPIEDVELAKHRVRKGSFFLQDLDRLPNFTSEGYGGIRRVYVYGEEDQVFSRDFQLWQINNYKPDKVYCVPGGDHKIMISRVNELAQILGEVANSAS

SEQ ID NO: 565 - DNA, 765 bp, synthetic construct
  misc_feature 1..765: note = Description of Artificial Sequence: Synthetic polynucleotide
  source 1..765: mol_type = other DNA
atgagtgcgcattttattctgatccacagtatctgccatggcgcctggctgtggtataaactgatcccgttattacagtctgcaggtcataccgttacggcgattgatcttgtcgctagcgggagtaatcctcaccaactggaagaaattggcacatggggtcagtactcagaaccattgttcaccctgatcgaatcgattccggaaggtaagaaagtcattctggtaggagaagcggggggcggcatgaatattgcactggccgcggagaaatatccggagaaagtgagcgctctcgtctttgtgaacggtcttatgcccgatatctcgcacagtccagcgttcgtggtaaagaaatatagcgaagttttcactgactggaaagattcgatcttcagcaattatacctacggtaacgacacggtcaccgcggttaaattgggagatcgtctgctggagaatatcttctccatgtctccgattgaagatgtagaactggcgaaacatcgtgtccgcaaaggctccttttttctgcaagacttggatcgcctgccgaactttacgtcggaagggtatggtggtattcgtcgtgtgtatgtttacggcgaagaagaccaggtttttagccgcgattttcagttatggcaaattaataattataagcctgataaagtgtactgtgtaccgggtggtgaccacaagattatgatcagccgcgtcaacgagctggcccagattctcggggaagttgcaaactctgcgtcg

SEQ ID NO: 566 - protein, 255 aa, synthetic construct
  REGION 1..255: note = Description of Artificial Sequence: Synthetic polypeptide
MSAHFILIHSICHGAWLWYKLIPLLQSAGHTVTAIDLVASGSNPHQLEEIGTWGQYSEPLFTLIESIPEGKKVILVGEAGGGMNIALAAEKYPEKVSALVFVNGLMPDISHSPAFVVKKYSEVFTDWKDSIFSNYTYGNDTVTAVKLGDRLLENIFSMSPIEDVELAKHRVRKGSFFLQDLDRLPNFTSEGYGGIRRVYVYGEEDQVFSRDFQLWQINNYKPDKVYCVPGGDHKIMISRVNELAQILGEVANSAS

SEQ ID NO: 567 - DNA, 765 bp, synthetic construct
  misc_feature 1..765: note = Description of Artificial Sequence: Synthetic polynucleotide
  source 1..765: mol_type = other DNA
atgagtgcgcattttattctgatccacagtatctgccatggcgcctggctgtggtataaactgatcccgttattacagtctgcaggtcataccgttacggcgattgatcttgtcgctagcgggagtaatcctcaccaactggaagaaattggcacatggggtcagtactcagaaccattgttcaccctgatcgaatcgattccggaaggtaagaaagtcattctggtaggagaagcggggggcggcatcaatattgcactggccgcggagaaatatccggagaaagtgagcgctctcgtctttgtgaacggtcttatgcccgatatctcgcacagtccagcgttcgtggtaaagaaatatagcgaagttttcactgactggaaagattcgatcttcagcaattatacctacggtaacgaccaggtcaccgcggttaaattgggagatcgtctgctggagaatatcttctccatgtctccgattgaagatgtagaactggcgaaacatcgtgtccgcaaaggctccttttttctgcaagacttggatcgcctgccgaactttacgtcggaagggtatggtggtattcgtcgtgtgtatgtttacggcgaagaagaccaggtttttagccgcgattttcagttatggcaaattaataattataagcctgataaagtgtactgtgtaccgggtggtgaccacaagattatgatcagccgcgtcaacgagctggcccagattctcggggaagttgcaaactctgcgtcg

SEQ ID NO: 568 - protein, 255 aa, synthetic construct
  REGION 1..255: note = Description of Artificial Sequence: Synthetic polypeptide
MSAHFILIHSICHGAWLWYKLIPLLQSAGHTVTAIDLVASGSNPHQLEEIGTWGQYSEPLFTLIESIPEGKKVILVGEAGGGINIALAAEKYPEKVSALVFVNGLMPDISHSPAFVVKKYSEVFTDWKDSIFSNYTYGNDQVTAVKLGDRLLENIFSMSPIEDVELAKHRVRKGSFFLQDLDRLPNFTSEGYGGIRRVYVYGEEDQVFSRDFQLWQINNYKPDKVYCVPGGDHKIMISRVNELAQILGEVANSAS

SEQ ID NO: 569 - DNA, 765 bp, synthetic construct
  misc_feature 1..765: note = Description of Artificial Sequence: Synthetic polynucleotide
  source 1..765: mol_type = other DNA
atgagtgcgcattttattctgatccacagtatctgccatggcgcctggctgtggtataaactgatcccgttattacagtctgcaggtcataccgttacggcgattgatcttgtcgctagcgggagtaatcctcaccaactggaagaaattggcacatggggtcagtactcagaaccattgttcaccctgatcgaatcgattccggaaggtaagaaagtcattctggtaggagaagcggggggcggcatcaatattgcactggccgcggagaaatatccggagaaagtgagcgctctcgtctttgtgaacggtcttatgcccgatatctcgcacagtccagcgttcgtggtaaagaaatatagcacggttttcactgactggaaagattcgatcttcagcaattatacctacggtaacgacacggtcaccgcggttaaattgggagatcgtctgctggagaatatcttctccatgtctccgattgaagatgtagaactggcgaaacatcgtgtccgcaaaggctccttttttctgcaagacttggatcgcctgccgaactttacgtcggaagggtatggtggtattcgtcgtgtgtatgtttacggcgaagaagaccaggtttttagccgcgattttcagttatggcaaattaataattataagcctgataaagtgtactgtgtaccgggtggtgaccacaagattatgatcagccgcgtcaacgagctggcccagattctcggggaagttgcaaactctgcgtcg

SEQ ID NO: 570 - protein, 255 aa, synthetic construct
  REGION 1..255: note = Description of Artificial Sequence: Synthetic polypeptide
MSAHFILIHSICHGAWLWYKLIPLLQSAGHTVTAIDLVASGSNPHQLEEIGTWGQYSEPLFTLIESIPEGKKVILVGEAGGGINIALAAEKYPEKVSALVFVNGLMPDISHSPAFVVKKYSTVFTDWKDSIFSNYTYGNDTVTAVKLGDRLLENIFSMSPIEDVELAKHRVRKGSFFLQDLDRLPNFTSEGYGGIRRVYVYGEEDQVFSRDFQLWQINNYKPDKVYCVPGGDHKIMISRVNELAQILGEVANSAS

SEQ ID NO: 571 - DNA, 765 bp, synthetic construct
  misc_feature 1..765: note = Description of Artificial Sequence: Synthetic polynucleotide
  source 1..765: mol_type = other DNA
atgagtgcgcattttattctgatccacagtatctgccatggcgcctggctgtggtataaactgatcccgttattacagtctgcaggtcataccgttacggcgattgatcttgtcgctagcgggagtaatcctcaccaactggaagaaattggcacatggggtcagtactcagaaccattgttcaccctgatcgaatcgattccggaaggtaagaaagtcattctggtaggagaagcggggggcggcatcaatattgcactggccgcggagaaatatccggagaaagtgagcgctctcgtctttgtgaacggtcttatgcccgatatctcgcacagtccagcgttcgtggtaaagaaatatagcgaagttttcactgactggaaagattcgggtttcagcaattatacctacggtaacgacacggtcaccgcggttaaattgggagatcgtctgctggagaatatcttctccatgtctccgattgaagatgtagaactggcgaaacatcgtgtccgcaaaggctccttttttctgcaagacttggatcgcctgccgaactttacgtcggaagggtatggtggtattcgtcgtgtgtatgtttacggcgaagaagaccaggtttttagccgcgattttcagttatggcaaattaataattataagcctgataaagtgtactgtgtaccgggtggtgaccacaagattatgatcagccgcgtcaacgagctggcccagattctcggggaagttgcaaactctgcgtcg

SEQ ID NO: 572 - protein, 255 aa, synthetic construct
  REGION 1..255: note = Description of Artificial Sequence: Synthetic polypeptide
MSAHFILIHSICHGAWLWYKLIPLLQSAGHTVTAIDLVASGSNPHQLEEIGTWGQYSEPLFTLIESIPEGKKVILVGEAGGGINIALAAEKYPEKVSALVFVNGLMPDISHSPAFVVKKYSEVFTDWKDSGFSNYTYGNDTVTAVKLGDRLLENIFSMSPIEDVELAKHRVRKGSFFLQDLDRLPNFTSEGYGGIRRVYVYGEEDQVFSRDFQLWQINNYKPDKVYCVPGGDHKIMISRVNELAQILGEVANSAS

SEQ ID NO: 573 - DNA, 765 bp, synthetic construct
  misc_feature 1..765: note = Description of Artificial Sequence: Synthetic polynucleotide
  source 1..765: mol_type = other DNA
atgagtgcgcattttattctgatccacagtatctgccatggcgcctggctgtggtataaactgatcccgttattacagtctgcaggtcataccgttacggcgattgatcttgtcgctagcgggagtaatcctcaccaactggaagaaattggcacatggggtcagtactcagaaccattgttcaccctgatcgaatcgattccggaaggtaagaaagtcattctggtaggagaagcggggggcggcatcaatattgcactggccgcggagaaatatccggagaaagtgagcgctctcgtctttgtgaacggtcttatgcccgatatctcgcacagtccagcgttcgtggtaaagaaatatagcgaagttttcactgactggaaagattcgatcttcagcaattatacctacggtaacgacacggtcaccgcggttaaattgggagatcgtctgctggagaatatcttctccatgtctccgattgaagatgtagaactggcgaaacatcgtgtccgcaaaggctccttttttctgcaagacttggatcgcctgccgaactttacgtcggaagggtatggtggtattcgtcgtgtgtatgtttacggcgaagaagaccaggtttttagccgcgattttcagttatggcaaattaataattataagcctgataaagtgtactgtgtaccgggtggtgaccacaagattatgatcagccgcgtcaacgagctggcccagattctcggggaagttgcaaactctgcggtg

SEQ ID NO: 574 - protein, 255 aa, synthetic construct
  REGION 1..255: note = Description of Artificial Sequence: Synthetic polypeptide
MSAHFILIHSICHGAWLWYKLIPLLQSAGHTVTAIDLVASGSNPHQLEEIGTWGQYSEPLFTLIESIPEGKKVILVGEAGGGINIALAAEKYPEKVSALVFVNGLMPDISHSPAFVVKKYSEVFTDWKDSIFSNYTYGNDTVTAVKLGDRLLENIFSMSPIEDVELAKHRVRKGSFFLQDLDRLPNFTSEGYGGIRRVYVYGEEDQVFSRDFQLWQINNYKPDKVYCVPGGDHKIMISRVNELAQILGEVANSAV

SEQ ID NO: 575 - DNA, 765 bp, synthetic construct
  misc_feature 1..765: note = Description of Artificial Sequence: Synthetic polynucleotide
  source 1..765: mol_type = other DNA
atgagtgcgcattttattctgatccacagtatctgccatggcgcctggctgtggtataaactgatcccgttattacagtctgcaggtcataccgttacggcgattgatcttgtcgctagcgggagtaatcctcaccaactggaagaaattggcacatggggtcagtactcagaaccattgttcaccctgatcgaatcgattccggaaggtaagaaagtcattctggtaggagaagcggggggcggcatcaatattgcactggccgcggagaaatatccggagaaagtgagcgctctcgtctttgtgaacggtcttatgcccgatatctcgcacagtccagcgttcgtggtaaagaaatatagcgaagttttcactgactggaaagattcgatcttcagcaattatacctacggtaacgacacggtcaccgcggttaaattgggagatcgtctgctggagaatatcttctccatgtctccgattgaagatgtagaactggcgaaacatcgtgtccgcaaaggctccttttttctgcaagacttgggtcgcctgccgaactttacgtcggaagggtatggtggtattcgtcgtgtgtatgtttacggcgaagaagaccaggtttttagccgcgattttcagttatggcaaattaataattataagcctgataaagtgtactgtgtaccgggtggtgaccacaagattatgatcagccgcgtcaacgagctggcccagattctcggggaagttgcaaactctgcgtcg

SEQ ID NO: 576 - protein, 255 aa, synthetic construct
  REGION 1..255: note = Description of Artificial Sequence: Synthetic polypeptide
MSAHFILIHSICHGAWLWYKLIPLLQSAGHTVTAIDLVASGSNPHQLEEIGTWGQYSEPLFTLIESIPEGKKVILVGEAGGGINIALAAEKYPEKVSALVFVNGLMPDISHSPAFVVKKYSEVFTDWKDSIFSNYTYGNDTVTAVKLGDRLLENIFSMSPIEDVELAKHRVRKGSFFLQDLGRLPNFTSEGYGGIRRVYVYGEEDQVFSRDFQLWQINNYKPDKVYCVPGGDHKIMISRVNELAQILGEVANSAS

SEQ ID NO: 577 - DNA, 765 bp, synthetic construct
  misc_feature 1..765: note = Description of Artificial Sequence: Synthetic polynucleotide
  source 1..765: mol_type = other DNA
atgagtgcgcattttattctgatccacagtatctgccatggcgcctggctgtggtataaactgatcccgttattacagtctgcaggtcataccgttacggcgattgatcttgtcgctagcgggagtaatcctcaccaactggaagaaattggcacatggggtcagtactcagaaccattgttcaccctgatcgaatcgattccggaaggtaagaaagtcattctggtaggagaagcggggggcggcatcaatattgcactggccgcggagaaatatccggagaaagtgagcgctctcgtctttgtgaacggtcttatgcccgatatctcgcacagtccagcgttcgtggtaaagaaatatagcgaagttttcactgactggaaagattcgatcttcagcaattatacctacggtaacgacacggtcaccgcggttaaattgggagatcgtctgctggagaatatcttctccatgtctccgattgaagatgtagaactggcgaaacatcgtgtccgccttggctccttttttctgcaagacttggatcgcctgccgaactttacgtcggaagggtatggtggtattcgtcgtgtgtatgtttacggcgaagaagaccaggtttttagccgcgattttcagttatggcaaattaataattataagcctgataaagtgtactgtgtaccgggtggtgaccacaagattatgatcagccgcgtcaacgagctggcccagattctcggggaagttgcaaactctgcgtcg

SEQ ID NO: 578 - protein, 255 aa, synthetic construct
  REGION 1..255: note = Description of Artificial Sequence: Synthetic polypeptide
MSAHFILIHSICHGAWLWYKLIPLLQSAGHTVTAIDLVASGSNPHQLEEIGTWGQYSEPLFTLIESIPEGKKVILVGEAGGGINIALAAEKYPEKVSALVFVNGLMPDISHSPAFVVKKYSEVFTDWKDSIFSNYTYGNDTVTAVKLGDRLLENIFSMSPIEDVELAKHRVRLGSFFLQDLDRLPNFTSEGYGGIRRVYVYGEEDQVFSRDFQLWQINNYKPDKVYCVPGGDHKIMISRVNELAQILGEVANSAS

SEQ ID NO: 579 - DNA, 765 bp, synthetic construct
  misc_feature 1..765: note = Description of Artificial Sequence: Synthetic polynucleotide
  source 1..765: mol_type = other DNA
atgagtgcgcattttattctgatccacagtatctgccatggcgcctggctgtggtataaactgatcccgttattacagtctgcaggtcataccgttacggcgattgatcttgtcgctagcgggagtaatcctcaccaactggaagaaattggcacatggggtcagtactcagaaccattgttcaccctgatcgaatcgattccggaaggtaagaaagtcattctggtaggagaagcggggggcggcatcaatattgcactggccgcggagaaatatccggagaaagtgagcgctctcgtctttgtgaacggtcttatgcccgatatctcgcacagtccagcgttcgtggtaaagaaatatagcgaagttttcactgactggaaagattcgatcttcagcaattatacctacggtaacgacacggtcaccgcggttaaattgggagatcgtctgctggagaatatcttctccatgtctccgattgaagatgtagaactggcgaaacatcgtgtccgcaaaggctccttttttctgcaagacttggatcgcctgccgaactttacgtcggaagggtatggtggtattcgtcgtgtgtatgtttacggcgaagaagaccaggtttttagccgcgattttatgttatggcaaattaataattataagcctgataaagtgtactgtgtaccgggtggtgaccacaagattatgatcagccgcgtcaacgagctggcccagattctcggggaagttgcaaactctgcgtcg

SEQ ID NO: 580 - protein, 255 aa, synthetic construct
  REGION 1..255: note = Description of Artificial Sequence: Synthetic polypeptide
MSAHFILIHSICHGAWLWYKLIPLLQSAGHTVTAIDLVASGSNPHQLEEIGTWGQYSEPLFTLIESIPEGKKVILVGEAGGGINIALAAEKYPEKVSALVFVNGLMPDISHSPAFVVKKYSEVFTDWKDSIFSNYTYGNDTVTAVKLGDRLLENIFSMSPIEDVELAKHRVRKGSFFLQDLDRLPNFTSEGYGGIRRVYVYGEEDQVFSRDFMLWQINNYKPDKVYCVPGGDHKIMISRVNELAQILGEVANSAS

SEQ ID NO: 581 - DNA, 765 bp, synthetic construct
  misc_feature 1..765: note = Description of Artificial Sequence: Synthetic polynucleotide
  source 1..765: mol_type = other DNA
atgagtgcgcattttattctgatccacagtatctgccatggcgcctggctgtggtataaactgatcccgttattacagtctgcaggtcataccgttacggcgattgatcttgtcgctagcgggagtaatcctcaccaactggaagaaattggcacatggggtcagtactcagaaccattgttcaccctgatcgaatcgattccggaaggtaagaaagtcattctggtaggagaagcggggggcggcatcaatattgcactggccgcggagaaatatccggagaaagtgagcgctctcgtctttgtgaacggtcttatgcccgatatctcgcacagtccagcgttcgtggtaaagaaatatagcgaagttttcactgactggaaagattcgatcttcagcgtgtatacctacggtaacgacacggtcaccgcggttaaattgggagatcgtctgctggagaatatcttctccatgtctccgattgaagatgtagaactggcgaaacatcgtgtccgcaaaggctccttttttctgcaagacttggatcgcctgccgaactttacgtcggaagggtatggtggtattcgtcgtgtgtatgtttacggcgaagaagaccaggtttttagccgcgattttcagttatggcaaattaataattataagcctgataaagtgtactgtgtaccgggtggtgaccacaagattatgatcagccgcgtcaacgagctggcccagattctcggggaagttgcaaactctgcgtcg

SEQ ID NO: 582 - protein, 255 aa, synthetic construct
  REGION 1..255: note = Description of Artificial Sequence: Synthetic polypeptide
MSAHFILIHSICHGAWLWYKLIPLLQSAGHTVTAIDLVASGSNPHQLEEIGTWGQYSEPLFTLIESIPEGKKVILVGEAGGGINIALAAEKYPEKVSALVFVNGLMPDISHSPAFVVKKYSEVFTDWKDSIFSVYTYGNDTVTAVKLGDRLLENIFSMSPIEDVELAKHRVRKGSFFLQDLDRLPNFTSEGYGGIRRVYVYGEEDQVFSRDFQLWQINNYKPDKVYCVPGGDHKIMISRVNELAQILGEVANSAS

SEQ ID NO: 583 - DNA, 765 bp, synthetic construct
  misc_feature 1..765: note = Description of Artificial Sequence: Synthetic polynucleotide
  source 1..765: mol_type = other DNA
atgagtgcgcattttattctgatccacagtatctgccatggcgcctggctgtggtataaactgatcccgttattacagtctgcaggtcataccgttacggcgattgatcttgtcgctagcgggagtaatcctcaccaactggaagaaattggcacatggggtcagtactcagaaccattgttcaccctgatcgaatcgattccggaaggtaagaaagtcattctggtaggagaagcggggggcggcatcaatattgcactggccgcggagaaatatccggagaaagtgagcgctctcgtctttgtgaacggtcttatgcccgatatctcgcacagtccagcgttcgtggtaaagaaatatagcgaagttttcactgactggaaagattcgatcttcagcaattatacctacggtaacgacacggtcaccgcggttaaattgggagatcgtctgctggagaatatcttctccatgtctccgattgaagatgtagaactggcgaaacatcgtgtccgcaaaggctccttttttctgcaagacttggatcgcctgccgaactttacgtcggaagggtatggtggtattcgtcgtgtgtatgtttacggcgaagaagaccaggtttttagccgcgattttcagttatggcaaattaataattataagcctgataaagtgtactgtgtaccgggtggtgaccacaagattatgatcagccgcgtcaacgagctggcccagattctcggggaagttgcaaactctgcgcag

SEQ ID NO: 584 - protein, 255 aa, synthetic construct
  REGION 1..255: note = Description of Artificial Sequence: Synthetic polypeptide
MSAHFILIHSICHGAWLWYKLIPLLQSAGHTVTAIDLVASGSNPHQLEEIGTWGQYSEPLFTLIESIPEGKKVILVGEAGGGINIALAAEKYPEKVSALVFVNGLMPDISHSPAFVVKKYSEVFTDWKDSIFSNYTYGNDTVTAVKLGDRLLENIFSMSPIEDVELAKHRVRKGSFFLQDLDRLPNFTSEGYGGIRRVYVYGEEDQVFSRDFQLWQINNYKPDKVYCVPGGDHKIMISRVNELAQILGEVANSAQ

SEQ ID NO: 585 - DNA, 765 bp, synthetic construct
  misc_feature 1..765: note = Description of Artificial Sequence: Synthetic polynucleotide
  source 1..765: mol_type = other DNA
atgagtgcgcattttattctgatccacagtatctgccatggcgcctggctgtggtataaactgatcccgttattacagtctgcaggtcataccgttacggcgattgatcttgtcgctagcgggagtaatcctcaccaactggaagaaattggcacatggggtcagtactcagaaccattgttcaccctgatcgaatcgattccggaaggtaagaaagtcattctggtaggagaagcggggggcggcatcaatattgcactggccgcggagaaatatccggagaaagtgagcgctctcgtctttgtgaacggtcttatgcccgatatctcgcacagtccagcgttcgtggtaaagaaatatagcgaagttttcactgactggaaagattcgatcttcagcaattatacctacggtaacgacacggtcaccgcggttaaattgggagatcgtctgctggagaatatcttctccatgtctccgattgaagatgtagaactggcgaaacatcgtgtccgcaaaggctccttttttattcaagacttggatcgcctgccgaactttacgtcggaagggtatggtggtattcgtcgtgtgtatgtttacggcgaagaagaccaggtttttagccgcgattttcagttatggcaaattaataattataagcctgataaagtgtactgtgtaccgggtggtgaccacaagattatgatcagccgcgtcaacgagctggcccagattctcggggaagttgcaaactctgcgtcg

SEQ ID NO: 586 - protein, 255 aa, synthetic construct
  REGION 1..255: note = Description of Artificial Sequence: Synthetic polypeptide
MSAHFILIHSICHGAWLWYKLIPLLQSAGHTVTAIDLVASGSNPHQLEEIGTWGQYSEPLFTLIESIPEGKKVILVGEAGGGINIALAAEKYPEKVSALVFVNGLMPDISHSPAFVVKKYSEVFTDWKDSIFSNYTYGNDTVTAVKLGDRLLENIFSMSPIEDVELAKHRVRKGSFFIQDLDRLPNFTSEGYGGIRRVYVYGEEDQVFSRDFQLWQINNYKPDKVYCVPGGDHKIMISRVNELAQILGEVANSAS

SEQ ID NO: 587 - DNA, 765 bp, synthetic construct
  misc_feature 1..765: note = Description of Artificial Sequence: Synthetic polynucleotide
  source 1..765: mol_type = other DNA
atgagtgcgcattttattctgatccacagtatctgccatggcgcctggctgtggtataaactgatcccgttattacagtctgcaggtcataccgttacggcgattgatcttgtcgctagcgggagtaatcctcaccaactggaagaaattggcacatggggtcagtactcagaaccattgttcaccctgatcgaatcgattccggaaggtaagaaagtcattctggtaggagaagcggggggcggcatcaatattgcactggccgcggagaaatatccggagaaagtgagcgctctcgtcctggtgaacggtcttatgcccgatatctcgcacagtccagcgttcgtggtaaagaaatatagcgaagttttcactgactggaaagattcgatcttcagcaattatacctacggtaacgacacggtcaccgcggttaaattgggagatcgtctgctggagaatatcttctccatgtctccgattgaagatgtagaactggcgaaacatcgtgtccgcaaaggctccttttttctgcaagacttggatcgcctgccgaactttacgtcggaagggtatggtggtattcgtcgtgtgtatgtttacggcgaagaagaccaggtttttagccgcgattttcagttatggcaaattaataattataagcctgataaagtgtactgtgtaccgggtggtgaccacaagattatgatcagccgcgtcaacgagctggcccagattctcggggaagttgcaaactctgcgtcg

SEQ ID NO: 588 - protein, 255 aa, synthetic construct
  REGION 1..255: note = Description of Artificial Sequence: Synthetic polypeptide
MSAHFILIHSICHGAWLWYKLIPLLQSAGHTVTAIDLVASGSNPHQLEEIGTWGQYSEPLFTLIESIPEGKKVILVGEAGGGINIALAAEKYPEKVSALVLVNGLMPDISHSPAFVVKKYSEVFTDWKDSIFSNYTYGNDTVTAVKLGDRLLENIFSMSPIEDVELAKHRVRKGSFFLQDLDRLPNFTSEGYGGIRRVYVYGEEDQVFSRDFQLWQINNYKPDKVYCVPGGDHKIMISRVNELAQILGEVANSAS

SEQ ID NO: 589 - DNA, 765 bp, synthetic construct
  misc_feature 1..765: note = Description of Artificial Sequence: Synthetic polynucleotide
  source 1..765: mol_type = other DNA
atgagtgcgcattttattctgatccacagtatctgccatggcgcctggctgtggtataaactgatcccgttattacagtctgcaggtcataccgttacggcgattgatcttgtcgctagcgggagtaatcctcaccaactggaagaaattggcacatggggtcagtactcagaaccattgttcaccctgatcgaatcgattccggaaggtaagaaagtcattctggtaggagaagcggggggcggcatcaatattgcactggccgcggagaaatatccggagaaagtgagcgctctcgtctttgtgaacggtcttatgcccgatatctcgcacagtccagcgttcgtggtaaagcgttatagcgaagttttcactgactggaaagattcgatcttcagcaattatacctacggtaacgacacggtcaccgcggttaaattgggagatcgtctgctggagaatatcttctccatgtctccgattgaagatgtagaactggcgaaacatcgtgtccgcaaaggctccttttttctgcaagacttggatcgcctgccgaactttacgtcggaagggtatggtggtattcgtcgtgtgtatgtttacggcgaagaagaccaggtttttagccgcgattttcagttatggcaaattaataattataagcctgataaagtgtactgtgtaccgggtggtgaccacaagattatgatcagccgcgtcaacgagctggcccagattctcggggaagttgcaaactctgcgtcg

SEQ ID NO: 590 - protein, 255 aa, synthetic construct
  REGION 1..255: note = Description of Artificial Sequence: Synthetic polypeptide
MSAHFILIHSICHGAWLWYKLIPLLQSAGHTVTAIDLVASGSNPHQLEEIGTWGQYSEPLFTLIESIPEGKKVILVGEAGGGINIALAAEKYPEKVSALVFVNGLMPDISHSPAFVVKRYSEVFTDWKDSIFSNYTYGNDTVTAVKLGDRLLENIFSMSPIEDVELAKHRVRKGSFFLQDLDRLPNFTSEGYGGIRRVYVYGEEDQVFSRDFQLWQINNYKPDKVYCVPGGDHKIMISRVNELAQILGEVANSAS

SEQ ID NO: 591 - DNA, 765 bp, synthetic construct
  misc_feature 1..765: note = Description of Artificial Sequence: Synthetic polynucleotide
  source 1..765: mol_type = other DNA
atgagtgcgcattttattctgatccacagtatctgccatggcgcctggctgtggtataaactgatcccgttattacagtctgcaggtcataccgttacggcgattgatcttgtcgctagcgggagtaatcctcaccaactggaagaaattggcacatggggtcagtactcagaaccattgttcaccctgatcgaatcgattccggaaggtaagaaagtcattctggtaggagaagcggggggcggcatcaatattgcactggccgcggagaaatatccggagaaagtgagcgctctcgtctttgtgaacggtcttatgcccgatatctcgcacagtccagcgttcgtggtaaagaaatatagcgaagttttcactgactggaaagattcgatcttcagcaattatacctacggtaacgacacggtcaccgcggttaaattgggagatcgtctgctggagaatatcttctccatgtctccgattgaagatgtagaactggcgaaacatcgtgtccgcaaaggctccttttttctgcaagacttggatcgcctgccgaactttacgtcggaagggtatggtggtattcgtcgtgtgtatgtttacggcgaagaagaccaggtttttagccgcgattttcagttatggcaaattaataattataagcctgataaagtgtactgtgtaccgggtggtgaccacaagattatgatcagccgcgtcaacgagctggcccagattctcggggaagttgcaaactgtgcgtcg

SEQ ID NO: 592 - protein, 255 aa, synthetic construct
  REGION 1..255: note = Description of Artificial Sequence: Synthetic polypeptide
MSAHFILIHSICHGAWLWYKLIPLLQSAGHTVTAIDLVASGSNPHQLEEIGTWGQYSEPLFTLIESIPEGKKVILVGEAGGGINIALAAEKYPEKVSALVFVNGLMPDISHSPAFVVKKYSEVFTDWKDSIFSNYTYGNDTVTAVKLGDRLLENIFSMSPIEDVELAKHRVRKGSFFLQDLDRLPNFTSEGYGGIRRVYVYGEEDQVFSRDFQLWQINNYKPDKVYCVPGGDHKIMISRVNELAQILGEVANCAS

SEQ ID NO: 593 - DNA, 765 bp, synthetic construct
  misc_feature 1..765: note = Description of Artificial Sequence: Synthetic polynucleotide
  source 1..765: mol_type = other DNA
atgggggcgcattttattctgatccacagtatctgccatggcgcctggctgtggtataaactgatcccgttattacagtctgcaggtcataccgttacggcgattgatcttgtcgctagcgggagtaatcctcaccaactggaagaaattggcacatggggtcagtactcagaaccattgttcaccctgatcgaatcgattccggaaggtaagaaagtcattctggtaggagaagcggggggcggcatcaatattgcactggccgcggagaaatatccggagaaagtgagcgctctcgtctttgtgaacggtcttatgcccgatatctcgcacagtccagcgttcgtggtaaagaaatatagcgaagttttcactgactggaaagattcgatcttcagcaattatacctacggtaacgacacggtcaccgcggttaaattgggagatcgtctgctggagaatatcttctccatgtctccgattgaagatgtagaactggcgaaacatcgtgtccgcaaaggctccttttttctgcaagacttggatcgcctgccgaactttacgtcggaagggtatggtggtattcgtcgtgtgtatgtttacggcgaagaagaccaggtttttagccgcgattttcagttatggcaaattaataattataagcctgataaagtgtactgtgtaccgggtggtgaccacaagattatgatcagccgcgtcaacgagctggcccagattctcggggaagttgcaaactctgcgtcg

SEQ ID NO: 594 - protein, 255 aa, synthetic construct
  REGION 1..255: note = Description of Artificial Sequence: Synthetic polypeptide
MGAHFILIHSICHGAWLWYKLIPLLQSAGHTVTAIDLVASGSNPHQLEEIGTWGQYSEPLFTLIESIPEGKKVILVGEAGGGINIALAAEKYPEKVSALVFVNGLMPDISHSPAFVVKKYSEVFTDWKDSIFSNYTYGNDTVTAVKLGDRLLENIFSMSPIEDVELAKHRVRKGSFFLQDLDRLPNFTSEGYGGIRRVYVYGEEDQVFSRDFQLWQINNYKPDKVYCVPGGDHKIMISRVNELAQILGEVANSAS

SEQ ID NO: 595 - DNA, 765 bp, synthetic construct
  misc_feature 1..765: note = Description of Artificial Sequence: Synthetic polynucleotide
  source 1..765: mol_type = other DNA
atgagtgcgcattttattctgatccacagtatctgccatggcgcctggctgtggtataaactgatcccgttattacagtctgcaggtcataccgttacggcgattgatcttgtcgctagcgggagtaatcctcaccaactggaagaaattggcacatggggtcagtactcagaaccattgttcaccctgatcgaatcgattccggaaggtaagaaagtcattctggtaggagaagcggggggcggcatcaatattgcactggccgcggagaaatatccggagaaagtgagcgctctcgtctttgtgaacggtcttatgcccgatatctcgcacagtccagcgttcgtggtaaggaaatatagcgaagttttcactgactggaaagattcgatcttcagcaattatacctacggtaacgacacggtcaccgcggttaaattgggagatcgtctgctggagaatatcttctccatgtctccgattgaagatgtagaactggcgaaacatcgtgtccgcaaaggctccttttttctgcaagacttggatcgcctgccgaactttacgtcggaagggtatggtggtattcgtcgtgtgtatgtttacggcgaagaagaccaggtttttagccgcgattttcagttatggcaaattaataattataagcctgataaagtgtactgtgtaccgggtggtgaccacaagattatgatcagccgcgtcaacgagctggcccagattctcggggaagttgcaaactctgcgtcg

SEQ ID NO: 596 - protein, 255 aa, synthetic construct
  REGION 1..255: note = Description of Artificial Sequence: Synthetic polypeptide
MSAHFILIHSICHGAWLWYKLIPLLQSAGHTVTAIDLVASGSNPHQLEEIGTWGQYSEPLFTLIESIPEGKKVILVGEAGGGINIALAAEKYPEKVSALVFVNGLMPDISHSPAFVVRKYSEVFTDWKDSIFSNYTYGNDTVTAVKLGDRLLENIFSMSPIEDVELAKHRVRKGSFFLQDLDRLPNFTSEGYGGIRRVYVYGEEDQVFSRDFQLWQINNYKPDKVYCVPGGDHKIMISRVNELAQILGEVANSAS

SEQ ID NO: 597 - DNA, 765 bp, synthetic construct
  misc_feature 1..765: note = Description of Artificial Sequence: Synthetic polynucleotide
  source 1..765: mol_type = other DNA
atgagtgcgcattttattctgatccacagtatctgccatggcgcctggctgtggtataaactgatcccgttattacagtctgcaggtcataccgttacggcgattgatcttgtcgctagcgggagtaatcctcaccaactggaagaaattggcacatggggtcagtactcagaaccattgttcaccctgatcgaatcgattccggaaggtaagaaagtcattctggtaggagaagcggggggcggcatcaatattgcactggccgcggagaaatatccggagaaagtgagcgctctcgtctttgtgaacggtcttatgcccgatatctcgcacagtccagcgttcgtggtaaagaaatatagcgaagttttcactgactggatggattcgatcttcagcaattatacctacggtaacgacacggtcaccgcggttaaattgggagatcgtctgctggagaatatcttctccatgtctccgattgaagatgtagaactggcgaaacatcgtgtccgcaaaggctccttttttctgcaagacttggatcgcctgccgaactttacgtcggaagggtatggtggtattcgtcgtgtgtatgtttacggcgaagaagaccaggtttttagccgcgattttcagttatggcaaattaataattataagcctgataaagtgtactgtgtaccgggtggtgaccacaagattatgatcagccgcgtcaacgagctggcccagattctcggggaagttgcaaactctgcgtcg

SEQ ID NO: 598 - protein, 255 aa, synthetic construct
  REGION 1..255: note = Description of Artificial Sequence: Synthetic polypeptide
MSAHFILIHSICHGAWLWYKLIPLLQSAGHTVTAIDLVASGSNPHQLEEIGTWGQYSEPLFTLIESIPEGKKVILVGEAGGGINIALAAEKYPEKVSALVFVNGLMPDISHSPAFVVKKYSEVFTDWMDSIFSNYTYGNDTVTAVKLGDRLLENIFSMSPIEDVELAKHRVRKGSFFLQDLDRLPNFTSEGYGGIRRVYVYGEEDQVFSRDFQLWQINNYKPDKVYCVPGGDHKIMISRVNELAQILGEVANSAS

SEQ ID NO: 599 - DNA, 765 bp, synthetic construct
  misc_feature 1..765: note = Description of Artificial Sequence: Synthetic polynucleotide
  source 1..765: mol_type = other DNA
atgagtgcgcattttattctgatccacagtatctgccatggcgcctggctgtggtataaactgatcccgttattacagtctgcaggtcataccgttacggcgattgatcttgtcgctagcgggagtaatcctcaccaactggaagaaattggcacatggggtcagtactcagaaccattgttcaccctgatcgaatcgattccggaaggtaagaaagtcattctggtaggagaagcggggggcggcatcaatattgcactggccgcggagaaatatccggagaaagtgagcgctctcgtctttgtgaacggtcttatgcccgatatctcgcacagtccagcgttcgtggtaaagaaatatagcgaagttttcactgactggaaagattcgatcttcagcaattatacctacggtaacgacacggtcaccgcggttaaattgggagggcgtctgctggagaatatcttctccatgtctccgattgaagatgtagaactggcgaaacatcgtgtccgcaaaggctccttttttctgcaagacttggatcgcctgccgaactttacgtcggaagggtatggtggtattcgtcgtgtgtatgtttacggcgaagaagaccaggtttttagccgcgattttcagttatggcaaattaataattataagcctgataaagtgtactgtgtaccgggtggtgaccacaagattatgatcagccgcgtcaacgagctggcccagattctcggggaagttgcaaactctgcgtcg

SEQ ID NO: 600 - protein, 255 aa, synthetic construct
  REGION 1..255: note = Description of Artificial Sequence: Synthetic polypeptide
MSAHFILIHSICHGAWLWYKLIPLLQSAGHTVTAIDLVASGSNPHQLEEIGTWGQYSEPLFTLIESIPEGKKVILVGEAGGGINIALAAEKYPEKVSALVFVNGLMPDISHSPAFVVKKYSEVFTDWKDSIFSNYTYGNDTVTAVKLGGRLLENIFSMSPIEDVELAKHRVRKGSFFLQDLDRLPNFTSEGYGGIRRVYVYGEEDQVFSRDFQLWQINNYKPDKVYCVPGGDHKIMISRVNELAQILGEVANSAS

SEQ ID NO: 601 - DNA, 765 bp, synthetic construct
  misc_feature 1..765: note = Description of Artificial Sequence: Synthetic polynucleotide
  source 1..765: mol_type = other DNA
atgagtgcgcattttattctgatccacagtatctgccatggcgcctggctgtggtataaactgatcccgttattacagtctgcaggtcataccgttacggcgattgatcttgtcgctagcgggagtaatcctcaccaactggaagaaattggcacatggggtcagtactcagaaccattgttcaccctgatcgaatcgattccggaaggtaagaaagtcattctggtaggagaagcggggggcggcatcaatattgcactggccgcggagaaatatccggagaaagtgagcgctctcgtctttgtgaacggtcttatgcccgatatctcgcacagtccagcgttcgtggtaaagaaatatgttgaagttttcactgactggaaagattcgatcttcagcaattatacctacggtaacgacacggtcaccgcggttaaattgggagatcgtctgctggagaatatcttctccatgtctccgattgaagatgtagaactggcgaaacatcgtgtccgcaaaggctccttttttctgcaagacttggatcgcctgccgaactttacgtcggaagggtatggtggtattcgtcgtgtgtatgtttacggcgaagaagaccaggtttttagccgcgattttcagttatggcaaattaataattataagcctgataaagtgtactgtgtaccgggtggtgaccacaagattatgatcagccgcgtcaacgagctggcccagattctcggggaagttgcaaactctgcgtcg

SEQ ID NO: 602 - protein, 255 aa, synthetic construct
  REGION 1..255: note = Description of Artificial Sequence: Synthetic polypeptide
MSAHFILIHSICHGAWLWYKLIPLLQSAGHTVTAIDLVASGSNPHQLEEIGTWGQYSEPLFTLIESIPEGKKVILVGEAGGGINIALAAEKYPEKVSALVFVNGLMPDISHSPAFVVKKYVEVFTDWKDSIFSNYTYGNDTVTAVKLGDRLLENIFSMSPIEDVELAKHRVRKGSFFLQDLDRLPNFTSEGYGGIRRVYVYGEEDQVFSRDFQLWQINNYKPDKVYCVPGGDHKIMISRVNELAQILGEVANSAS

SEQ ID NO: 603 - DNA, 765 bp, synthetic construct
  misc_feature 1..765: note = Description of Artificial Sequence: Synthetic polynucleotide
  source 1..765: mol_type = other DNA
atgagtgcgcattttattctgatccacagtatctgccatggcgcctggctgtggtataaactgatcccgttattacagtctgcaggtcataccgttacggcgattgatcttgtcgctagcgggagtaatcctcaccaactggaagaaattggcacatggggtcagtactcagaaccattgttcaccctgatcgaatcgattccggaaggtaagaaagtcattctggtaggagaagcggggggcggcatcaatattgcactggccgcggagaaatatccggagaaagtgagcgctctcgtctttgtgaacggtcttatgcccgatatctcgcacagtccagcgttcgtggtaaagaaatatagcgaagttttcactgactggagggattcgatcttcagcaattatacctacggtaacgacacggtcaccgcggttaaattgggagatcgtctgctggagaatatcttctccatgtctccgattgaagatgtagaactggcgaaacatcgtgtccgcaaaggctccttttttctgcaagacttggatcgcctgccgaactttacgtcggaagggtatggtggtattcgtcgtgtgtatgtttacggcgaagaagaccaggtttttagccgcgattttcagttatggcaaattaataattataagcctgataaagtgtactgtgtaccgggtggtgaccacaagattatgatcagccgcgtcaacgagctggcccagattctcggggaagttgcaaactctgcgtcg

SEQ ID NO: 604 - protein, 255 aa, synthetic construct
  REGION 1..255: note = Description of Artificial Sequence: Synthetic polypeptide
MSAHFILIHSICHGAWLWYKLIPLLQSAGHTVTAIDLVASGSNPHQLEEIGTWGQYSEPLFTLIESIPEGKKVILVGEAGGGINIALAAEKYPEKVSALVFVNGLMPDISHSPAFVVKKYSEVFTDWRDSIFSNYTYGNDTVTAVKLGDRLLENIFSMSPIEDVELAKHRVRKGSFFLQDLDRLPNFTSEGYGGIRRVYVYGEEDQVFSRDFQLWQINNYKPDKVYCVPGGDHKIMISRVNELAQILGEVANSAS

SEQ ID NO: 605 - DNA, 792 bp, Baliospermum montanum
  source 1..792: mol_type = unassigned DNA
atggtgagcgctcattttattctgatacacacaatatgccacggagcttggctatggtataagctcatacctttgttacagtcagctgggcacaatgccactgcaattgaccttgtagccagtgggattgacccaagacaactggaacaaattggcacatgggaacaatactcagagccattatttactttaatcgaatcaatccctgaaggaaaaaaggttatacttgttggagagagcggtggaggaataaacatcgccttagctgctgaaaaatatccagagaaagtttctgccttagttttccacaatgcattgatgcctgacattgatcacagtccagcttttgtttataaaaagttcagtgaggtatttactgactggaaggacagcattttttcaaattacacttatggaaatgacactgtaactgcagtagaattgggtgacaggactttagcggagaatatttttagcaattcgcctattgaggatgtagaactggcaaagcatttggtaaggaagggatcattctttgaacaagatttagatacactcccaaacttcaccagcgaaggttatggatcaattagaagagtttatgtgtatggagaggaagaccaaatattttcaagggactttcaactttggcaaataaataattataaaccagacaaggtttattgtgtccccagtgcagatcataaaattcagatttccaaagtcaacgaattagcccaaattctacaagaagttgcaaattctgcaagtgacttgctggctgtcgcatga

SEQ ID NO: 606 - protein, 263 aa, Baliospermum montanum [sequence omitted]

SEQ ID NO: 607 - DNA, 765 bp, synthetic construct
  misc_feature 1..765: note = Engineered variants of (S)-hydroxynitrile lyase from Baliospermum montanum
  source 1..765: mol_type = other DNA
atgagtgcgcattttattctgatccacagtatctgccatggcgcctggctgtggtataaactgattccgttattacagggctggggtcataccgttacggcgattgatcttgtcgctagcgggagtaatcctcaccaactggaagaaattggcacatggggtcagtactcagaaccattgttcaccgccatcgaatcgattccggaaggtaagaaagtcattctggtaggagaagcggggggcggcatcaatattgcactggccgcggagaaatatccggagaaagtgagcgctctcgtctttgtgaacggtcttatgcccgatatctcgcacagcccagcgttcgtggtaaagaaatatagcgaagttttcactgactggaaagattcgatcttcagcaattatacctacggtaacgacacggtcaccgcggttaagttgggagatcgtctgctggagaatatcttctccatgtctccgattgaagatgtagaactggcgaaacatcgtgtccgcaaaggctccttttttctgcaagacttggatcgcctgccgaactttacgtcggaagggtatggtagtatccgtcgtgtgtatgtttgcggcgaagaagaccaggtttttagccgcgattttcagttatggcaaattaataattatattcctgataaagtgtactgtgtaccgggtggtgaccacaagattatgatcagccgcgtcaacgagctggcccagattctcggggaagttgcaaactctgcgtcg

SEQ ID NO: 608 - protein, 255 aa, synthetic construct
  REGION 1..255: note = Engineered variants of (S)-hydroxynitrile lyase from Baliospermum montanum
MSAHFILIHSICHGAWLWYKLIPLLQGWGHTVTAIDLVASGSNPHQLEEIGTWGQYSEPLFTAIESIPEGKKVILVGEAGGGINIALAAEKYPEKVSALVFVNGLMPDISHSPAFVVKKYSEVFTDWKDSIFSNYTYGNDTVTAVKLGDRLLENIFSMSPIEDVELAKHRVRKGSFFLQDLDRLPNFTSEGYGSIRRVYVCGEEDQVFSRDFQLWQINNYIPDKVYCVPGGDHKIMISRVNELAQILGEVANSAS

SEQ ID NO: 609 - DNA, 786 bp, synthetic construct
  misc_feature 1..786: note = Engineered variants of (S)-hydroxynitrile lyase from Baliospermum montanum
  source 1..786: mol_type = other DNA
atgagtgcgcattttattctgatccacagtatctgccatggcgcctggctgtggtataaactgattccgttattacagggctggggtcataccgttacggcgattgatcttgtcgctagcgggagtaatcctcaccaactggaagaaattggcacatggggtcagtactcagaaccattgttcacccaaatcgaatcgattccggaaggtaagaaagtcattctggtaggagaagcggggggcggcatcaatattgcactggccgcggagaaatatccggagaaagtgagcgctctcgtctttgtgaacggtcttatgcccgatatctcgcacagcccagcgttcgtggtaaagaaatatagcgaaactttcactgactggaaagattcgatcttcagcaattatacctacggtaacgacacggtcaccgcggttaagttgggagatcgtctgctggagaatatcttctccatgtctccgattgaagatgtagaactggcgaaacatcgtgtccgcaagggctccttttttctgcaagacttggatcgcctgccgaactttacgtcggaagggtatggtagtatccgtcgtgtgtatgtttgtggcgaagaagaccaggtttttagccgcgattttcagttatggcaaattaataattataagcctgataaagtgtactgtgtaccgggtggtgaccacaagattatgatcagccgcgtcaacgagctggcccagattctcggggaagttgcaaactctgcgtcgtaacttcttgcggtgagttaa

SEQ ID NO: 610 - protein, 255 aa, synthetic construct
  REGION 1..255: note = Engineered variants of (S)-hydroxynitrile lyase from Baliospermum montanum
MSAHFILIHSICHGAWLWYKLIPLLQGWGHTVTAIDLVASGSNPHQLEEIGTWGQYSEPLFTQIESIPEGKKVILVGEAGGGINIALAAEKYPEKVSALVFVNGLMPDISHSPAFVVKKYSETFTDWKDSIFSNYTYGNDTVTAVKLGDRLLENIFSMSPIEDVELAKHRVRKGSFFLQDLDRLPNFTSEGYGSIRRVYVCGEEDQVFSRDFQLWQINNYKPDKVYCVPGGDHKIMISRVNELAQILGEVANSAS

SEQ ID NO: 611 - DNA, 765 bp, synthetic construct
  misc_feature 1..765: note = Engineered variants of (S)-hydroxynitrile lyase from Baliospermum montanum
  source 1..765: mol_type = other DNA
atgagtgcgcattttattctgatccacagtatctgccatggcgcctggctgtggtataaactgattccgttattacagggctggggtcataccgttacggcgattgatcttgtcgctagcgggagtaatcctcaccaactggaagaaattggcacatggggtcagtactcagaaccattgttcaccgccatcgaatcgattccggaaggtaagaaagtcattctggtaggagaagcggggggcggcatcaatattgcactggccgcggagaaatatccggagaaagtgagcgctctcgtctttgtgaacggtcttatgcccgatatctcgcacagcccagcgttcgtggtaaagaaatatagcgaagttttcactgactggaaagattcgatcttcagcaattatacctacggtaacgacacggtcaccgcggttaagttgggagatcgtctgctggagaatatcttctccatgtctccgattgaagatgtagaactggcgaaacatcgtgtccgcaaaggctccttttttctgcaagacttggatcgcctgccgaactttacgtcggaagggtatggtagtatccgtcgtgtgtatgtttgcggcgaagaagaccaggtttttagccgcgattttcagttatggcaaattaataattatgatcctgataaagtgtactgtgtaccgggtggtgaccacaagattatgatcagccgcgtcaacgagctggcccagattctcggggaagttgcaaactctgcgtcg

SEQ ID NO: 612 - protein, 255 aa, synthetic construct
  REGION 1..255: note = Engineered variants of (S)-hydroxynitrile lyase from Baliospermum montanum
MSAHFILIHSICHGAWLWYKLIPLLQGWGHTVTAIDLVASGSNPHQLEEIGTWGQYSEPLFTAIESIPEGKKVILVGEAGGGINIALAAEKYPEKVSALVFVNGLMPDISHSPAFVVKKYSEVFTDWKDSIFSNYTYGNDTVTAVKLGDRLLENIFSMSPIEDVELAKHRVRKGSFFLQDLDRLPNFTSEGYGSIRRVYVCGEEDQVFSRDFQLWQINNYDPDKVYCVPGGDHKIMISRVNELAQILGEVANSAS

SEQ ID NO: 613 - DNA, 765 bp, synthetic construct
  misc_feature 1..765: note = Engineered variants of (S)-hydroxynitrile lyase from Baliospermum montanum
  source 1..765: mol_type = other DNA
atgagtgcgcattttattctgatccacagtatctgccatggcgcctggctgtggtataaactgattccgttattacagggctggggtcataccgttacggcgattgatcttgtcgctagcgggagtaatcctcaccaactggaagaaattggcacatggggtcagtactcagaaccattgttcaccgccatcgaatcgattccggaaggtaagaaagtcattctggtaggagaagcggggggcggcatcaatattgcactggccgcggagaaatatccggagaaagtgagcgctctcgtctttgtgaacggtcttatgcccgatatctcgcacagcccagcgttcgtggtaaagaaatatagcgaagttttcactgactggaaagattcgatcttcagcaattatacctacggtaacgacacggtcaccgcggttaagttgggagatcgtctgctggagaatatcttctccatgtctccgattgaagatgtagaactggcgaaacatagtgtccgcaaaggctccttttttctgcaagacttggatcgcctgccgaactttacgtcggaagggtatggtagtatccgtcgtgtgtatgtttgcggcgaagaagaccaggtttttagccgcgattttcagttatggcaaattaataattataagcctgataaagtgtactgtgtaccgggtggtgaccacaagattatgatcagccgcgtcaacgagctggcccagattctcggggaagttgcaaactctgcgtcg

SEQ ID NO: 614 - protein, 255 aa, synthetic construct
  REGION 1..255: note = Engineered variants of (S)-hydroxynitrile lyase from Baliospermum montanum
MSAHFILIHSICHGAWLWYKLIPLLQGWGHTVTAIDLVASGSNPHQLEEIGTWGQYSEPLFTAIESIPEGKKVILVGEAGGGINIALAAEKYPEKVSALVFVNGLMPDISHSPAFVVKKYSEVFTDWKDSIFSNYTYGNDTVTAVKLGDRLLENIFSMSPIEDVELAKHSVRKGSFFLQDLDRLPNFTSEGYGSIRRVYVCGEEDQVFSRDFQLWQINNYKPDKVYCVPGGDHKIMISRVNELAQILGEVANSAS

SEQ ID NO: 615 - DNA, 765 bp, synthetic construct
  misc_feature 1..765: note = Engineered variants of (S)-hydroxynitrile lyase from Baliospermum montanum
  source 1..765: mol_type = other DNA
atgagtgcgcattttattctgatccacagtatctgccatggcgcctggctgtggtataaactgattccgttattacagggctggggtcataccgttacggcgattgatcttgtcgctagcgggagtaatcctcaccaactggaagaaattggcacatggggtcagtactcagaaccattgttcaccgccatcgaatcgattccggaaggtaagaaagtcattctggtaggagaagcggggggcggcatcaatattgcactggccgcggagaaatatccggagaaagtgagcgctctcgtctttgtgaacggtcttatgcccgatatctcgcacagcccagcgttcgtggtaaagaaatatagcgaagttttcactgactggaaagattcgatcttcagcaattatacctacggtaacgacacggtcaccgcggttaagttgggagatcgtctgctggagaatatcttctccatgtctccgattgaagatgtagaactggcgaaacatcgtgtccgcaaaggctccttttttctgcaagacttggatcgcctgccgaactttacgtcggaagggtatggtagtatccgtcgtgtgtatgtttgcggcgaagaagaccaggtttttagccgcgattttcagttatggcaaattaataattataagcctgataaagtgtactgtgtaccgggtggtgaccacaagattatgatcagccgcgtcaacgagctggcccagattctcgggaaggttgcaaactctgcgtcg

SEQ ID NO: 616 - protein, 255 aa, synthetic construct
  REGION 1..255: note = Engineered variants of (S)-hydroxynitrile lyase from Baliospermum montanum
MSAHFILIHSICHGAWLWYKLIPLLQGWGHTVTAIDLVASGSNPHQLEEIGTWGQYSEPLFTAIESIPEGKKVILVGEAGGGINIALAAEKYPEKVSALVFVNGLMPDISHSPAFVVKKYSEVFTDWKDSIFSNYTYGNDTVTAVKLGDRLLENIFSMSPIEDVELAKHRVRKGSFFLQDLDRLPNFTSEGYGSIRRVYVCGEEDQVFSRDFQLWQINNYKPDKVYCVPGGDHKIMISRVNELAQILGKVANSAS

SEQ ID NO: 617 - DNA, 765 bp, synthetic construct
  misc_feature 1..765: note = Engineered variants of (S)-hydroxynitrile lyase from Baliospermum montanum
  source 1..765: mol_type = other DNA
atgagtgcgcattttattctgatccacagtatctgccatggcgcctggctgtggtataaactgattccgttattacagggctggggtcataccgttacggcgattgatcttgtcgctagcgggagtaatcctcaccaactggaagaaattggcacatggggtcagtactcagaaccattgttcaccgcaatcgaatcgattccggaaggtaagaaagtcattctggtaggagaagcggggggcggcatcaatattgcactggccgcggagaaatatccggagaaagtgagcgctctcgtctttgtgaacggtcttatgccggatatctcgcacagcccagcgttcgtggtaaagaaatatagcgaaactttcactgactggaaagattcgatcttcagcaattatacctacggtaacgacacggtcaccgcggttaagttgggagatcgtctgctggagaatatcttctccatgtctccgattgaagatgtagaactggcgaaacatcgtgtccgcaaaggctccttttttctgcaagacttggaccgcctgccgaactttacgtcggaagggtatggtagtatccgtcgtgtgtatgtttgtggcgaagaagaccaggtttttagccgcgattttcagttatggcaaattaataattataagcctgataaagtgtactgtgtaccgggtggtgaccacaagattatgatcagccgcgtcaacgagctggcccagattctcggggaagttgcaaactctgcgtcg

SEQ ID NO: 618 - protein, 255 aa, synthetic construct
  REGION 1..255: note = Engineered variants of (S)-hydroxynitrile lyase from Baliospermum montanum
MSAHFILIHSICHGAWLWYKLIPLLQGWGHTVTAIDLVASGSNPHQLEEIGTWGQYSEPLFTAIESIPEGKKVILVGEAGGGINIALAAEKYPEKVSALVFVNGLMPDISHSPAFVVKKYSETFTDWKDSIFSNYTYGNDTVTAVKLGDRLLENIFSMSPIEDVELAKHRVRKGSFFLQDLDRLPNFTSEGYGSIRRVYVCGEEDQVFSRDFQLWQINNYKPDKVYCVPGGDHKIMISRVNELAQILGEVANSAS

SEQ ID NO: 619 - DNA, 765 bp, synthetic construct
  misc_feature 1..765: note = Engineered variants of (S)-hydroxynitrile lyase from Baliospermum montanum
  source 1..765: mol_type = other DNA
atgagtgcgcattttattctgatccacagtatctgccatggcgcctggctgtggtataaactgattccgttattacagggctggggtcataccgttacggcgattgatcttgtcgctagcgggagtaatcctcaccaactggaagaaattggcacatggggtcagtactcagaaccattgttcaccgccatcgaatcgattccggaaggtaagaaagtcattctggtaggagaagcggggggcggcatcaatattgcactggccgcggagaaatatccggagaaagtgagcgctctcgtctttgtgaacggtcttatgcccgatatctcgcacagcccagcgttcgtggtaaagaaatatagcgaagttttcactgactggaaagattcgatcttcagcaattatacctacggtaacgacacggtcaccgcggttaagttgggagatcgtctgctggagaatatcttctccatgtctccgattgaagatgtagaactggcgaaacatcgtgtccgcaaaggctccttttttctgcaagacttggatcgcctgccgaactttacgtcggctgggtatggtagtatccgtcgtgtgtatgtttgcggcgaagaagaccaggtttttagccgcgattttcagttatggcaaattaataattataagcctgataaagtgtactgtgtaccgggtggtgaccacaagattatgatcagccgcgtcaacgagctggcccagattctcggggaagttgcaaactctgcgtcg

SEQ ID NO: 620 - protein, 255 aa, synthetic construct
  REGION 1..255: note = Engineered variants of (S)-hydroxynitrile lyase from Baliospermum montanum
MSAHFILIHSICHGAWLWYKLIPLLQGWGHTVTAIDLVASGSNPHQLEEIGTWGQYSEPLFTAIESIPEGKKVILVGEAGGGINIALAAEKYPEKVSALVFVNGLMPDISHSPAFVVKKYSEVFTDWKDSIFSNYTYGNDTVTAVKLGDRLLENIFSMSPIEDVELAKHRVRKGSFFLQDLDRLPNFTSAGYGSIRRVYVCGEEDQVFSRDFQLWQINNYKPDKVYCVPGGDHKIMISRVNELAQILGEVANSAS

SEQ ID NO: 621 - DNA, 765 bp, synthetic construct
  misc_feature 1..765: note = Engineered variants of (S)-hydroxynitrile lyase from Baliospermum montanum
  source 1..765: mol_type = other DNA
atgagtgcgcattttattctgatccacagtatctgccatggcgcctggctgtggtataaactgattccgttattacagggctggggtcataccgttacggcgattgatcttgtcgctagcgggagtaatcctcaccaactggaagaaattggcacatggggtcagtactcagaaccattgttcaccgccatcgaatcgattccggaaggtaagaaagtcattctggtaggagaagcggggggcggcatcaatattgcactggccgcggagaaatatccggagaaagtgagcgctctcgtctttgtgaacggtcttatgcccgatatctcgcacagcccagcgttcgtggtaaagaaatatagcgaagttttcactgactggaaagattcgatcttctttaattatacctacggtaacgacacggtcaccgcggttaagttgggagatcgtctgctggagaatatcttctccatgtctccgattgaagatgtagaactggcgaaacatcgtgtccgcaaaggctccttttttctgcaagacttggatcgcctgccgaactttacgtcggaagggtatggtagtatccgtcgtgtgtatgtttgcggcgaagaagaccaggtttttagccgcgattttcagttatggcaaattaataattataagcctgataaagtgtactgtgtaccgggtggtgaccacaagattatgatcagccgcgtcaacgagctggcccagattctcggggaagttgcaaactctgcgtcg

SEQ ID NO: 622 - protein, 255 aa, synthetic construct
  REGION 1..255: note = Engineered variants of (S)-hydroxynitrile lyase from Baliospermum montanum
MSAHFILIHSICHGAWLWYKLIPLLQGWGHTVTAIDLVASGSNPHQLEEIGTWGQYSEPLFTAIESIPEGKKVILVGEAGGGINIALAAEKYPEKVSALVFVNGLMPDISHSPAFVVKKYSEVFTDWKDSIFFNYTYGNDTVTAVKLGDRLLENIFSMSPIEDVELAKHRVRKGSFFLQDLDRLPNFTSEGYGSIRRVYVCGEEDQVFSRDFQLWQINNYKPDKVYCVPGGDHKIMISRVNELAQILGEVANSAS

SEQ ID NO: 623 - DNA, 786 bp, synthetic construct
  misc_feature 1..786: note = Engineered variants of (S)-hydroxynitrile lyase from Baliospermum montanum
  source 1..786: mol_type = other DNA
atgagtgcgcattttattctgatccacagtatctgccatggcgcctggctgtggtataaactgattccgttattacagagctggggtcataccgttacggcgattgatcttgtcgctagcgggagtaatcctcaccaactggaagaaattggcacatggggtcagtactcagaaccattgttcaccgccatcgaatcgattccggaaggtaagaaagtcattctggtaggagaagcggggggcggcatcaatattgcactggccgcggagaaatatccggagaaagtgagcgctctcgtctttgtgaacggtcttatgcccgatatctcgcacagcccagcgttcgtggtaaagaaatatagcgaagttttcactgactggaaagattcgatcttcagcaattatacctacggtaacgacacggtcaccgcggttaagttgggagatcgtctgctggagaatatcttctccatgtctccgattgaagatgtagaactggcgaaacatcgtgtccgcaaaggctccttttttctgcaagacttgaaacgcctgccgaactttacgtcggaagggtatggtagtatccgtcgtgtgtatgtttgcggcgaagaagaccaggtttttagccgcgattttcagttatggcaaattaataattataagcctgataaagtgtactgtgtaccgggtggtgaccacaagattatgatcagccgcgtcaacgagctggcccagattctcggggaagttgcaaactctgcgtcgtaacttcttgcggtgagttaa

SEQ ID NO: 624 - protein, 255 aa, synthetic construct
  REGION 1..255: note = Engineered variants of (S)-hydroxynitrile lyase from Baliospermum montanum
MSAHFILIHSICHGAWLWYKLIPLLQSWGHTVTAIDLVASGSNPHQLEEIGTWGQYSEPLFTAIESIPEGKKVILVGEAGGGINIALAAEKYPEKVSALVFVNGLMPDISHSPAFVVKKYSEVFTDWKDSIFSNYTYGNDTVTAVKLGDRLLENIFSMSPIEDVELAKHRVRKGSFFLQDLKRLPNFTSEGYGSIRRVYVCGEEDQVFSRDFQLWQINNYKPDKVYCVPGGDHKIMISRVNELAQILGEVANSAS

SEQ ID NO: 625 - DNA, 786 bp, synthetic construct
  misc_feature 1..786: note = Engineered variants of (S)-hydroxynitrile lyase from Baliospermum montanum
  source 1..786: mol_type = other DNA
atgagtgcgcattttattctgatccacagtatctgccatggcgcctggctgtggtataaactgattccgttattacagggctggggtcataccgttacggcgattgatcttgtcgctagcgggagtaatcctcaccaactggaagaaattggcacatggggtcagtactcagaaccattgttcaccgccatcgaatcgattccggaaggtaagaaagtcattctggtaggagaagcggggggcggcatcaatattgcactggccgcggagaaatatccggagaaagtgagcgctctcgtctttgtgaacggtcttatgcccgatatctcgcacagcccagcgttcgtggtaaagaaatatagcgaagttttcactgactggaaagattcgatcttcagcaattatacctacggtaacgacacggtcaccgcggttaagttgggagatcgtctgctggagaatatcttctccatgtctccgattgaagatgtagaactggcgaaacatttggtccgcaaaggctccttttttctgcaagacttggatcgcctgccgaactttacgtcggaagggtatggtagtatccgtcgtgtgtatgtttgcggcgaagaagaccaggtttttagccgcgattttcagttatggcaaattaataattataagcctgataaagtgtactgtgtaccgggtggtgaccacaagattatgatcagccgcgtcaacgagctggcccagattctcggggaagttgcaaactctgcgtcgtaacttcttgcggtgagttaa

SEQ ID NO: 626 - protein, 255 aa, synthetic construct
  REGION 1..255: note = Engineered variants of (S)-hydroxynitrile lyase from Baliospermum montanum
MSAHFILIHSICHGAWLWYKLIPLLQGWGHTVTAIDLVASGSNPHQLEEIGTWGQYSEPLFTAIESIPEGKKVILVGEAGGGINIALAAEKYPEKVSALVFVNGLMPDISHSPAFVVKKYSEVFTDWKDSIFSNYTYGNDTVTAVKLGDRLLENIFSMSPIEDVELAKHLVRKGSFFLQDLDRLPNFTSEGYGSIRRVYVCGEEDQVFSRDFQLWQINNYKPDKVYCVPGGDHKIMISRVNELAQILGEVANSAS

SEQ ID NO: 627 - DNA, 786 bp, synthetic construct
  misc_feature 1..786: note = Engineered variants of (S)-hydroxynitrile lyase from Baliospermum montanum
  source 1..786: mol_type = other DNA
atgagtgcgcattttattctgatccacagtatctgccatggcgcctgggtgtggtataaactgattccgttattacagggctggggtcataccgttacggcgattgatcttgtcgctagcgggagtaatcctcaccaactggaagaaattggcacatggggtcagtactcagaaccattgttcaccgcaatcgaatcgattccggaaggtaagaaagtcattctggtaggagaagcggggggcggcatcaatattgcactggccgcggagaaatatccggagaaagtgagcgctctcgtctttgtgaacggtcttatgccggatatctcgcacagcccagcgttcgtggtaaagaaatatagcgaagttttcactgactggaaagattcgatcttcagcaattatacctacggtaacgacacggtcaccgcggttaagttgggagatcgtctgctggagaatatcttctccatgtctccgattgaagatgtagaactggcgaaacatcgtgtccgcaagggctccttttttctgcaagacttggatcgcctgccgaactttacgtcggaagggtatggtagtatccgtcgtgtgtatgtttgcggcgaagaagaccaggtttttagccgcgattttcaattatggcaaattaataattataagcctgataaagtgtactgtgtaccgggtggtgaccacaagattatgatcagccgcgtcaacgagctggcccagattctcggggaagttgcaaactgcgcagtctaacttcttgcggtgagttaa

SEQ ID NO: 628 - protein, 255 aa, synthetic construct
  REGION 1..255: note = Engineered variants of (S)-hydroxynitrile lyase from Baliospermum montanum
MSAHFILIHSICHGAWVWYKLIPLLQGWGHTVTAIDLVASGSNPHQLEEIGTWGQYSEPLFTAIESIPEGKKVILVGEAGGGINIALAAEKYPEKVSALVFVNGLMPDISHSPAFVVKKYSEVFTDWKDSIFSNYTYGNDTVTAVKLGDRLLENIFSMSPIEDVELAKHRVRKGSFFLQDLDRLPNFTSEGYGSIRRVYVCGEEDQVFSRDFQLWQINNYKPDKVYCVPGGDHKIMISRVNELAQILGEVANCAV

SEQ ID NO: 629 - DNA, 786 bp, synthetic construct
  misc_feature 1..786: note = Engineered variants of (S)-hydroxynitrile lyase from Baliospermum montanum
  source 1..786: mol_type = other DNA
atgagtgcgcattttattctgatccacagtatctgccatggcgcctggctgtggtataaactgattccgttattacagggctggggtcataccgttacggcgattgatcttgtcgctagcgggagtaatcctcaccaactggaagaaattggcacatggggtcagtactcagaaccattgttcaccgccatcgaatcgattccggaaggtaagaaagtcattctggtaggagaagcggggggcggcatcaatattgcactggccgcggagaaatatccggagaaagtgagcgctctcgtctttgtgaacggtcttatgcccgatatctcgcacagcccagcgttcgtggtaaagaaatatagcgaagttttcactgactggaaagattcgatcttcagcaattatacctacggtaacgacacggtcaccgcggttaagttgggagatcgtctgctggagaatatcttctccatgtctccgattgaagatgtagaactggcgaaacatcgtgtccgcaaaggctccttttttctgcaagacttggatcgcctgccgaactttacgtcggaagggtatggtagtatccgtcgtgtgtatgtttgcggcgaagaagaccaggtttttagccgcgattttcagttatggcaaattaataattatgggcctgataaagtgtactgtgtaccgggtggtgaccacaagattatgatcagccgcgtcaacgagctggcccagattctcggggaagttgcaaactctgcgtcgtaacttcttgcggtgagttaa

SEQ ID NO: 630 - protein, 255 aa, synthetic construct
  REGION 1..255: note = Engineered variants of (S)-hydroxynitrile lyase from Baliospermum montanum
MSAHFILIHSICHGAWLWYKLIPLLQGWGHTVTAIDLVASGSNPHQLEEIGTWGQYSEPLFTAIESIPEGKKVILVGEAGGGINIALAAEKYPEKVSALVFVNGLMPDISHSPAFVVKKYSEVFTDWKDSIFSNYTYGNDTVTAVKLGDRLLENIFSMSPIEDVELAKHRVRKGSFFLQDLDRLPNFTSEGYGSIRRVYVCGEEDQVFSRDFQLWQINNYGPDKVYCVPGGDHKIMISRVNELAQILGEVANSAS

SEQ ID NO: 631 - DNA, 786 bp, synthetic construct
  misc_feature 1..786: note = Engineered variants of (S)-hydroxynitrile lyase from Baliospermum montanum
  source 1..786: mol_type = other DNA
atgagtgcgcattttattctgatccacagtatctgccatggcgcctggctgtggtataaactgattccgttattacagggctggggtcataccgttacggcgattgatcttgtcgctagcgggagtaatcctcaccaactggaagaaattggcacatggggtcagtactcagaaccattgttcaccgccatcgaatcgattccggaaggtaagaaagtcattctggtaggagaagcggggggcggcatcaatattgcactggccgcggagaaatatccggagaaagtgagcgctctcgtctttgtgaacggtcttatgcccgatatctcgcacagcccagcgttcgtggtaaagaaatatagcgaagttttcactgactggaaagattcgatcttcagcaattatacctacggtaacgacacggtcaccgcggttaagttgggagatcgtctgctggagaatatcttctccatgtctccgattgaagatgtagaactggcgaaacatcgtgtccgcaaaggctccttttttctgcaagacttggatcgcctgccgaactttacgtcggaagggtatggtggtatccgtcgtgtgtatgtttgcggcgaagaagaccaggtttttagccgcgattttcagttatggcaaattaataattataagcctgataaagtgtactgtgtaccgggtggtgaccacaagattatgatcagccgcgtcaacgagctggcccagattctcggggaagttgcaaactctgcgtcgtaacttcttgcggtgagttaa

SEQ ID NO: 632 - protein, 255 aa, synthetic construct
  REGION 1..255: note = Engineered variants of (S)-hydroxynitrile lyase from Baliospermum montanum
MSAHFILIHSICHGAWLWYKLIPLLQGWGHTVTAIDLVASGSNPHQLEEIGTWGQYSEPLFTAIESIPEGKKVILVGEAGGGINIALAAEKYPEKVSALVFVNGLMPDISHSPAFVVKKYSEVFTDWKDSIFSNYTYGNDTVTAVKLGDRLLENIFSMSPIEDVELAKHRVRKGSFFLQDLDRLPNFTSEGYGGIRRVYVCGEEDQVFSRDFQLWQINNYKPDKVYCVPGGDHKIMISRVNELAQILGEVANSAS

SEQ ID NO: 633 - DNA, 786 bp, synthetic construct
  misc_feature 1..786: note = Engineered variants of (S)-hydroxynitrile lyase from Baliospermum montanum
  source 1..786: mol_type = other DNA
atgagtgcgcattttattctgatccacagtatctgccatggcgcctggctgtggtataaactgattccgttattacagggctggggtcataccgttacggcgattgatcttgtcgctagcgggagtaatcctcaccaactggaagaaattggcacatggggtcagtactcagaaccattgttcaccgccatcgaatcgattccggaaggtaagaaagtcattctggtaggagaagcggggggcggcatcaatattgcactggccgcggagaaatatccggagaaagtgagcgctctcgtctttgtgaacggtcttatgcccgatatctcgcacagcccagcgttcgtggtaaagaaatatagcgaagttttcactgactggaaagattcgatcttcagcaattatacctacggtaacgacacggtcaccgcggttaagttgggagatcgtctgctggagaatatcttctccatgtctccgattgaagatgtagaactggcgaaacatcgtgtccgcaaaggctccttttttctgcaagacttggatcgcctgccgaactttacgtcggaagggtatggtagtatccgtcgtgtgtatgtttgcggcgaagaagaccaggtttttagccgcgattttcagttatggcaaattaataattatgttcctgataaagtgtactgtgtaccgggtggtgaccacaagattatgatcagccgcgtcaacgagctggcccagattctcggggaagttgcaaactctgcgtcgtaacttcttgcggtgagttaa

SEQ ID NO: 634 - protein, 255 aa, synthetic construct
  REGION 1..255: note = Engineered variants of (S)-hydroxynitrile lyase from Baliospermum montanum
MSAHFILIHSICHGAWLWYKLIPLLQGWGHTVTAIDLVASGSNPHQLEEIGTWGQYSEPLFTAIESIPEGKKVILVGEAGGGINIALAAEKYPEKVSALVFVNGLMPDISHSPAFVVKKYSEVFTDWKDSIFSNYTYGNDTVTAVKLGDRLLENIFSMSPIEDVELAKHRVRKGSFFLQDLDRLPNFTSEGYGSIRRVYVCGEEDQVFSRDFQLWQINNYVPDKVYCVPGGDHKIMISRVNELAQILGEVANSAS

SEQ ID NO: 635 - DNA, 765 bp, synthetic construct
  misc_feature 1..765: note = Engineered variants of (S)-hydroxynitrile lyase from Baliospermum montanum
  source 1..765: mol_type = other DNA
atgagtgcgcattttattctgatccacagtatctgccatggcgcctggctgtggtataaactgattccgttattacagggctggggtcataccgttacggcgattgatcttgtcgctagcgggagtaatcctcaccaactggaagaaattggcacatggggtcagtactcagaaccattgttcaccgccatcgaagatattccggaaggtaagaaagtcattctggtaggagaagcggggggcggcatcaatattgcactggccgcggagaaatatccggagaaagtgagcgctctcgtctttgtgaacggtcttatgcccgatatctcgcacagcccagcgttcgtggtaaagaaatatagcgaagttttcactgactggaaagattcgatcttcagcaattatacctacggtaacgacacggtcaccgcggttaagttgggagatcgtctgctggagaatatcttctccatgtctccgattgaagatgtagaactggcgaaacatcgtgtccgcaaaggctccttttttctgcaagacttggatcgcctgccgaactttacgtcggaagggtatggtagtatccgtcgtgtgtatgtttgcggcgaagaagaccaggtttttagccgcgattttcagttatggcaaattaataattataagcctgataaagtgtactgtgtaccgggtggtgaccacaagattatgatcagccgcgtcaacgagctggcccagattctcggggaagttgcaaactctgcgtcg

SEQ ID NO: 636 - protein, 255 aa, synthetic construct
  REGION 1..255: note = Engineered variants of (S)-hydroxynitrile lyase from Baliospermum montanum
MSAHFILIHSICHGAWLWYKLIPLLQGWGHTVTAIDLVASGSNPHQLEEIGTWGQYSEPLFTAIEDIPEGKKVILVGEAGGGINIALAAEKYPEKVSALVFVNGLMPDISHSPAFVVKKYSEVFTDWKDSIFSNYTYGNDTVTAVKLGDRLLENIFSMSPIEDVELAKHRVRKGSFFLQDLDRLPNFTSEGYGSIRRVYVCGEEDQVFSRDFQLWQINNYKPDKVYCVPGGDHKIMISRVNELAQILGEVANSAS

SEQ ID NO: 637 - DNA, 765 bp, synthetic construct
  misc_feature 1..765: note = Engineered variants of (S)-hydroxynitrile lyase from Baliospermum montanum
  source 1..765: mol_type = other DNA
atgagtgcgcattttattctgatccacagtatctgccatggcgcctggctgtggtataaactgattccgttattacagggctggggtcataccgttacggcgattgatcttgtcgctagcgggagtaatcctcaccaactggaagaaattggcacatggggtcagtactcagaaccattgttcaccgccatcgaatcgattccggaaggtaagaaagtcattctggtaggagaagcggggggcggcatcaatattgcactggccgcggagaaatatccggagaaagtgagcgctctcgtctttgtgaacggtcttatgcccgatatctcgcacagcccagcgttcgtggtaaagaaatatagcgaagttttcactgactggaaagattcgatcttcagcaattatacctacggtaacgacacggtcaccgcggttaagttgggagatcgtctgctggagaatatcttctccatgtctccgattgaagatgtagaactggcgaaacatcgtgtccgcaaaggctccttttttctgcaagacttggatcgcctgccgaactttacgtcggaagggtatggtagtatccctcgtgtgtatgtttgcggcgaagaagaccaggtttttagccgcgattttcagttatggcaaattaataattataagcctgataaagtgtactgtgtaccgggtggtgaccacaagattatgatcagccgcgtcaacgagctggcccagattctcggggaagttgcaaactctgcgtcg

SEQ ID NO: 638 - protein, 255 aa, synthetic construct
  REGION 1..255: note = Engineered variants of (S)-hydroxynitrile lyase from Baliospermum montanum
MSAHFILIHSICHGAWLWYKLIPLLQGWGHTVTAIDLVASGSNPHQLEEIGTWGQYSEPLFTAIESIPEGKKVILVGEAGGGINIALAAEKYPEKVSALVFVNGLMPDISHSPAFVVKKYSEVFTDWKDSIFSNYTYGNDTVTAVKLGDRLLENIFSMSPIEDVELAKHRVRKGSFFLQDLDRLPNFTSEGYGSIPRVYVCGEEDQVFSRDFQLWQINNYKPDKVYCVPGGDHKIMISRVNELAQILGEVANSAS

SEQ ID NO: 639 - DNA, 786 bp, synthetic construct
  misc_feature 1..786: note = Engineered variants of (S)-hydroxynitrile lyase from Baliospermum montanum
  source 1..786: mol_type = other DNA
atgagtgcgcattttattctgatccacagtatctgccatggcgcctggctgtggtataaactgattccgttattacagggctggggtcataccgttacggcgattgatcttgtcgctagcgggagtaatcctcaccaactggaagaaattggcacatggggtcagtactcagaaccattgttcaccgccatcgaatcgattccggaaggtaagaaagtcattctggtaggagaagcggggggcggcatcaatattgcactggccgcggagaaatatccggagaaagtgagcgctctcgtctttgtgaacggtcttatgcccgatatctcgcacagcccagcgttcgtggtaaagaaatatagcgaagttttcactgactggaaagattcgatcttcagcaattatacctacggtaacgacacggtcaccgcggttaagttgggagatcgtctgctggagaatatcttctccatgtctccgattgaagatgtagaactggcgaaacatcgtgtccgcaaaggctccttttttctgcaagacttggatcgcctgccgaactttacgtcggaagggtatggtagtatccgtcgtgtgtatgtttgcggcgaagaagaccaggtttttagcaaggattttcagttatggcaaattaataattataagcctgataaagtgtactgtgtaccgggtggtgaccacaagattatgatcagccgcgtcaacgagctggcccagattctcggggaagttgcaaactctgcgtcgtaacttcttgcggtgagttaa

SEQ ID NO: 640 - protein, 255 aa, synthetic construct
  REGION 1..255: note = Engineered variants of (S)-hydroxynitrile lyase from Baliospermum montanum
MSAHFILIHSICHGAWLWYKLIPLLQGWGHTVTAIDLVASGSNPHQLEEIGTWGQYSEPLFTAIESIPEGKKVILVGEAGGGINIALAAEKYPEKVSALVFVNGLMPDISHSPAFVVKKYSEVFTDWKDSIFSNYTYGNDTVTAVKLGDRLLENIFSMSPIEDVELAKHRVRKGSFFLQDLDRLPNFTSEGYGSIRRVYVCGEEDQVFSKDFQLWQINNYKPDKVYCVPGGDHKIMISRVNELAQILGEVANSAS

1. An engineered oxynitrilase polypeptide, which is a polypeptide of (a) or (b) below:
(a) a polypeptide comprising an amino acid sequence selected from the group consisting of SEQ ID NOs: 4, 6, 8, 10, 12, 14, 16, 18, 20, 22, 24, 26, 28, 30, 32, 34, 36, 38, 40, 42, 44, 46, 48, 50, 52, 54, 56, 58, 60, 62, 64, 66, 68, 70, 72, 74, 76, 78, 80, 82, 84, 86, 88, 90, 92, 94, 96, 98, 100, 102, 104, 106, 108, 110, 112, 114, 116, 118, 120, 122, 124, 126, 128, 130, 132, 134, 136, 138, 140, 142, 144, 146, 148, 150, 152, 154, 156, 158, 160, 162, 164, 166, 168, 170, 172, 174, 176, 178, 180, 182, 184, 186, 188, 190, 192, 194, 196, 198, 200, 202, 204, 206, 208, 210, 212, 214, 216, 218, 220, 222, 224, 226, 228, 230, 232, 234, 236, 238, 240, 242, 244, 246, 248, 250, 252, 254, 256, 258, 260, 262, 264, 266, 268, 270, 272, 274, 276, 278, 280, 282, 284, 286, 288, 290, 292, 294, 296, 298, 300, 302, 304, 306, 308, 310, 312, 314, 316, 318, 320, 322, 324, 326, 328, 330, 332, 334, 336, 338, 340, 342, 344, 346, 348, 350, 352, 354, 356, 358, 360, 362, 364, 366, 368, 370, 372, 374, 376, 378, 380, 382, 384, 386, 388, 390, 392, 394, 396, 398, 400, 402, 404, 406, 408, 410, 412, 414, 416, 418, 420, 422, 424, 426, 428, 430, 432, 434, 436, 438, 440, 442, 444, 446, 448, 450, 452, 454, 456, 458, 460, 462, 464, 466, 468, 470, 472, 474, 476, 478, 480, 482, 484, 486, 488, 490, 492, 494, 496, 498, 500, 502, 504, 506, 508, 510, 512, 514, 516, 518, 520, 522, 524, 526, 528, 530, 532, 534, 536, 538, 540, 542, 544, 546, 548, 550, 552, 554, 556, 558, 560, 562, 564, 566, 568, 570, 572, 574, 576, 578, 580, 582, 584, 586, 588, 590, 592, 594, 596, 598, 600, 602, 604, 608, 610, 612, 614, 616, 618, 620, 622, 624, 626, 628, 630, 632, 634, 636, 638, and 640;
or
(b) a polypeptide having oxynitrilase activity, which comprises an amino acid sequence having (i) at least 80% sequence identity to one of the polypeptides recited in (a), and (ii) a substitution, deletion, addition or insertion of one or more amino acid residues relative to said one amino acid sequence recited in (a).

2. An engineered oxynitrilase polypeptide, which is capable of coupling 1,1,1-trifluoropropan-2-one with nitromethane to produce (S)-1,1,1-trifluoro-2-methyl-3-nitropropan-2-ol under suitable reaction conditions at greater stereoselectivity and/or activity than that of SEQ ID NO: 606.

3. An engineered oxynitrilase polypeptide comprising an amino acid sequence having at least 80% sequence identity to SEQ ID NO: 606, which is, under suitable reaction conditions, capable of coupling 1,1,1-trifluoropropan-2-one with nitromethane to produce (S)-1,1,1-trifluoro-2-methyl-3-nitropropan-2-ol in an enantiomeric excess of at least 60%, 70%, 80%, 85%, 90%, 91%, 92%, 93%, 94%, 95%, 96%, 97%, 98%, 99% or more.

4. The oxynitrilase polypeptide of claim 3, wherein the suitable reaction conditions include about 5 g/L to about 150 g/L 1,1,1-trifluoropropan-2-one, nitromethane loading about 2 times the molar amount of 1,1,1-trifluoropropan-2-one, at least 3 g/L oxynitrilase polypeptide, isopropyl acetate concentration of about 20% (v/v) to about 60% (v/v), pH of about 4.0 to 8.0, and temperature of about 10° C. to 30° C.

5. The oxynitrilase polypeptide of claim 3 or 4, wherein the amino acid sequence of the oxynitrilase comprises an amino acid sequence that differs from the sequence of SEQ ID NO: 2 in one or more amino acid residues selected from: 2, 12, 28, 29, 32, 39, 50, 55, 64, 105, 111, 147, 152, 154, 160, 185, 196, 203, 208, 209, 232, 233, and 250, wherein the numbering refers to SEQ ID NO: 2, and wherein the polypeptide has oxynitrilase activity.

6. The oxynitrilase polypeptide of claim 5, wherein the amino acid sequence of the oxynitrilase comprises one or more of the following amino acid residues:
X2 is absent; X12 is I; X28 is G; X29 is W; X32 is T; X39 is F or V; X50 is E or D; X55 is G;
X64 is A; X105 is G; X111 is S; X147 is K; X152 is L; X154 is absent; X160 is M; X185 is R;
X196 is G; X203 is C; X208 is R or S; X209 is V; X232 is G; X233 is G; or X250 is G; wherein the numbering refers to SEQ ID NO: 2.

7. The oxynitrilase polypeptide of claim 3 to 6, wherein the amino acid sequence of the oxynitrilase comprises an amino acid sequence that differs from the sequence of SEQ ID NO: 2 in one or more amino acid residues selected from: 39, 105, and 154, wherein the numbering refers to SEQ ID NO: 2, and wherein the polypeptide has oxynitrilase activity.

8. The oxynitrilase polypeptide of claim 7, wherein the amino acid sequence of the oxynitrilase comprises one or more of the following amino acid residues:
X39 is F or V; X105 is G; or X154 is absent; wherein the numbering refers to SEQ ID NO: 2.

9. The oxynitrilase polypeptide according to any one of claims 3 and 4, wherein the amino acid sequence of the oxynitrilase comprises an amino acid sequence that differs from the sequence of SEQ ID NO: 606 in one or more amino acid residues selected from: 2, 11, 12, 28, 29, 32, 33, 39, 43, 44, 46, 50, 55, 64, 80, 103, 105, 111, 118, 121, 147, 152, 154, 160, 172, 180, 185, 196, 203, 208, 209, 232, 233, 238, 241, 250, and 263, wherein the numbering refers to SEQ ID NO: 606, and wherein the polypeptide has oxynitrilase activity.

10. The oxynitrilase polypeptide of claim 9, wherein the amino acid sequence of the oxynitrilase comprises one or more of the following amino acid residues:
X2 is absent; X1I is S; X12 is V; X28 is G; X29 is W; X32 is T; X33 is V; X39 is F, X43 is S;
X44 is N; X46 is H; X50 is E or D; X55 is R or G; X64 is A; X80 is A; X103 is V; X105 is G;
X111 is S; X118 is V; X121 is Y; X147 is K; X152 is L; X154 is absent; X160 is M; X172 is R;
X180 is L; X185 is R; X196 is G; X203 is C; X208 is R or S; X209 is V; X232 is G; X233 is G;
X238 is M; X241 is R; X250 is G; or X263 is S; wherein the numbering refers to SEQ ID NO: 606.

11. The oxynitrilase polypeptide according to any one of claims 3, 4 and 9, wherein the amino acid sequence of the oxynitrilase comprises an amino acid sequence that differs from the sequence of SEQ ID NO: 606 in one or more amino acid residues selected from: 2, 105, 111, 154, 160, 185, 209, 232, and 250, wherein the numbering refers to SEQ ID NO: 606, and
wherein the polypeptide has oxynitrilase activity.

12. The oxynitrilase polypeptide of claim 11, wherein the amino acid sequence of the oxynitrilase comprises one or more of the following amino acid residues:
X2 is absent; X105 is G; X111 is S; X154 is absent; X160 is M; X185 is R; X209 is V; X232 is G; or
X250 is G; wherein the numbering refers to SEQ ID NO: 606.

13. A polypeptide immobilized on a solid material by chemical bond or a physical adsorption method, wherein the polypeptide is selected from the oxynitrilase polypeptides according to any one of claims 1 to 12.

14. A polynucleotide encoding the polypeptide of any one of claims 1 to 13.

15. The polynucleotide of claim 14, wherein the polynucleotide sequence is SEQ ID NO: 3, 5, 7, 9, 11, 13, 15, 17, 19, 21, 23, 25, 27, 29, 31, 33, 35, 37, 39, 41, 43, 45, 47, 49, 51, 53, 55, 57, 59, 61, 63, 65, 67, 69, 71, 73, 75, 77, 79, 81, 83, 85, 87, 89, 91, 93, 95, 97, 99, 101, 103, 105, 107, 109, 111, 113, 115, 117, 119, 121, 123, 125, 127, 129, 131, 133, 135, 137, 139, 141, 143, 145, 147, 149, 151, 153, 155, 157, 159, 161, 163, 165, 167, 169, 171, 173, 175, 177, 179, 181, 183, 185, 187, 189, 191, 193, 195, 197, 199, 201, 203, 205, 207, 209, 211, 213, 215, 217, 219, 221, 223, 225, 227, 229, 231, 233, 235, 237, 239, 241, 243, 245, 247, 249, 251, 253, 255, 257, 259, 261, 263, 265, 267, 269, 271, 273, 275, 277, 279, 281, 283, 285, 287, 289, 291, 293, 295, 297, 299, 301, 303, 305, 307, 309, 311, 313, 315, 317, 319, 321, 323, 325, 327, 329, 331, 333, 335, 337, 339, 341, 343, 345, 347, 349, 351, 353, 355, 357, 359, 361, 363, 365, 367, 369, 371, 373, 375, 377, 379, 381, 383, 385, 387, 389, 391, 393, 395, 397, 399, 401, 403, 405, 407, 409, 411, 413, 415, 417, 419, 421, 423, 425, 427, 429, 431, 433, 435, 437, 439, 441, 443, 445, 447, 449, 451, 453, 455, 457, 459, 461, 463, 465, 467, 469, 471, 473, 475, 477, 479, 481, 483, 485, 487, 489, 491, 493, 495, 497, 499, 501, 503, 505, 507, 509, 511, 513, 515, 517, 519, 521, 523, 525, 527, 529, 531, 533, 535, 537, 539, 541, 543, 545, 547, 549, 551, 553, 555, 557, 559, 561, 563, 565, 567, 569, 571, 573, 575, 577, 579, 581, 583, 585, 587, 589, 591, 593, 595, 597, 599, 601, 603, 607, 609, 611, 613, 615, 617, 619, 621, 623, 625, 627, 629, 631, 633, 635, 637 or 639.

16. An expression vector comprising the polynucleotide according to any one of claims 14 and 15.

17. The expression vector of claim 16, which comprises a plasmid, a cosmid, a bacteriophage or a viral vector.

18. A host cell comprising the expression vector of any one of claims 16 and 17, wherein the host cell is preferably E. coli.

19. A method of preparing an oxynitrilase polypeptide, which comprises the steps of culturing the host cell according to claim 18 and obtaining an oxynitrilase polypeptide from the culture.

20. An oxynitrilase catalyst obtainable by culturing the host cells according to claim 18, or according to the method of claim 19, wherein said oxynitrilase catalyst comprises cells or culture fluid containing the oxynitrilase polypeptides, or an article processed therewith, wherein the article refers to an extract obtained from the culture of transformant cell, an isolated product obtained by isolating or purifying an oxynitrilase from the extract, or an immobilized product obtained by immobilizing transformant cell, an extract thereof, or isolated product of the extract.

21. A process for the asymmetric synthesis of a j-nitro alcohol, the process comprising the step of contacting a nitroalkane and an aldehyde or ketone substrate with the oxynitrilase polypeptide according to any one of claims 1 to 13, to obtain a j-nitro alcohol product.

22. The process according to claim 21, wherein the aldehyde or ketone substrate comprises an electron withdrawing substituent.

23. The process according to any one of claims 21 and 22, wherein the resulting β-nitro alcohol has the structure shown in formula (I): [chemical structure]
wherein:
R¹ and R² are each independently selected from H, alkyl, e.g., C₁-C₂₀alkyl, alkenyl, e.g., C₂-C₂₀alkenyl, alkynyl, e.g., C₂-C₂₀alkynyl, cycloalkyl, e.g., C₃-C₁₀cycloalkyl, aryl, e.g., C₆-C₁₄aryl, arylalkyl, e.g., C₇-C₂₀arylalkyl, heterocyclyl, e.g., 3-14 membered heterocyclyl, and heteroaryl, e.g., 5-20 membered heteroaryl,
wherein the alkyl, alkenyl, and alkynyl are each optionally substituted by one or more R^{a}, e.g., one to six R^{a},
wherein the cycloalkyl, aryl, arylalkyl, heterocyclyl, and heteroaryl are each optionally substituted by one or more R^{b}, e.g., one to six R^{b};
R³ and R⁴ are each independently selected from H and alkyl, e.g., C₁-C₂₀alkyl, wherein the alkyl, e.g., C₁-C₂₀alkyl, is optionally substituted by one or more R^{b}, e.g., one to six R^{b};
each R^{a} is at each occurrence independently selected from cycloalkyl, e.g., C₃-C₁₀cycloalkyl, aryl, e.g., C₆-C₁₄aryl, arylalkyl, e.g., C₇-C₂₀arylalkyl, heterocyclyl, e.g., 3-14 membered heterocyclyl, and heteroaryl, e.g., 5-20 membered heteroaryl, halogen, e.g., F, haloalkyl, e.g., C₁-C₂₀haloalkyl, e.g., —CF₃, —CN, —OR^{c}, —NR^{c}R^{c}, —(CH₂)ₙCOOR^{c}, —(CH₂)ₙ—C(═O)R^{c}, —(CH₂)ₙ—C(═O)NR^{c}R^{c};
each R^{b} is at each occurrence independently selected from halogen, e.g., F, haloalkyl, e.g., C₁-C₂₀haloalkyl, e.g., —CF₃, —CN, —NO₂, —OR^{c}, —NR^{c}R^{c}, —(CH₂)ₙCOOR^{c}, —(CH₂)ₙ—C(═O)R^{c}, —(CH₂)ₙ—C(═O)NR^{c}R^{c}, C₁-C₂₀alkyl, C₂-C₂₀alkenyl, or C₂-C₂₀alkynyl;
each R^{c} is at each occurrence independently selected from H, C₁-C₂₀alkyl, C₂-C₂₀alkenyl, and C₂-C₂₀alkynyl, each optionally substituted by one or more R^{b}, e.g., one to six R^{b}; and
n is 0, 1, 2, 3, 4, 5 or 6, e.g., 0, 1, 2 or 3;
the process comprising the step of contacting a nitroalkane of formula (II) which is R³R⁴CHNO₂ and an aldehyde or ketone substrate with the oxynitrilase polypeptide according to any one of claims 1 to 13, to obtain a β-nitro alcohol product of formula (I), the aldehyde or ketone substrate having the formula (III),

[chemical structure]

24. The process according claim 23, wherein R³ and R⁴ are each independently selected from H and C₁-C₂₀alkyl, wherein the C₁-C₂₀alkyl is optionally substituted by one to six R^{a},
wherein each R^{a} is at each occurrence independently selected from C₃-C₁₀cycloalkyl, C₆-C₁₄aryl, 3-14 membered heterocyclyl, 5-20 membered heteroaryl, halogen, e.g., F, haloalkyl, e.g., C₁-C₂₀haloalkyl, e.g., —CF₃, —OR^{c}, and —NR^{c}R^{c};
wherein each R^{c} is at each occurrence independently selected from H, C₁-C₂₀alkyl, C₂-C₂₀alkenyl, and C₂-C₂₀alkynyl.

25. The process according to any one of claims 23 and 24, wherein R³ and R⁴ are each independently selected from H and C₁-C₂₀alkyl, wherein the C₁-C₂₀alkyl is optionally substituted by one to six R^{a},
wherein each R^{a} is at each occurrence independently selected from halogen, e.g., F, C₁-C₂₀haloalkyl, e.g., —CF₃, —OR^{c}, and —NR^{c}R^{c};
wherein each R^{c} is at each occurrence independently selected from H, C₁-C₂₀alkyl, C₂-C₂₀alkenyl, and C₂-C₂₀alkynyl.

26. The process according to any one of claims 23 to 25, wherein R³ and R⁴ are each independently selected from H and C₁-C₂₀alkyl, wherein the C₁-C₂₀alkyl is optionally substituted by one to six R^{a},
wherein each R^{a} is at each occurrence independently selected from halogen, e.g., F, C₁-C₂₀haloalkyl, e.g., —CF₃, —OR^{c}, and —NR^{c}R^{c};
wherein each R^{c} is at each occurrence independently selected from H, and C₁-C₂₀alkyl.

27. The process according to any one of claims 21 to 26, wherein the resulting j-nitro alcohol has the structure shown in formula (I-i): [chemical structure]
wherein:
R¹ and R² are each independently selected from H, alkyl, e.g., C₁-C₂₀alkyl, alkenyl, e.g., C₂-C₂₀alkenyl, alkynyl, e.g., C₂-C₂₀alkynyl, cycloalkyl, e.g., C₃-C₁₀cycloalkyl, aryl, e.g., C₆-C₁₄aryl, arylalkyl, e.g., C₇-C₂₀arylalkyl, heterocyclyl, e.g., 3-14 membered heterocyclyl, and heteroaryl, e.g., 5-20 membered heteroaryl,
wherein the alkyl, alkenyl, and alkynyl are each optionally substituted by one or more R^{a}, e.g., one to six R^{a},
wherein the cycloalkyl, aryl, arylalkyl, heterocyclyl, and heteroaryl are each optionally substituted by one or more R^{b}, e.g., one to six R^{b};
each R^{a} is at each occurrence independently selected from cycloalkyl, e.g., C₃-C₁₀cycloalkyl, aryl, e.g., C₆-C₁₄aryl, arylalkyl, e.g., C₇-C₂₀arylalkyl, heterocyclyl, e.g., 3-14 membered heterocyclyl, and heteroaryl, e.g., 5-20 membered heteroaryl, halogen, e.g., F, haloalkyl, e.g., C₁-C₂₀haloalkyl, e.g., —CF₃, —CN, —OR^{c}, —NR^{c}R^{c}, —(CH₂)ₙCOOR^{c}, —(CH₂)ₙ—C(═O)R^{c}, —(CH₂)ₙ—C(═O)NR^{c}R^{c};
each R^{b} is at each occurrence independently selected from halogen, e.g., F, haloalkyl, e.g., C₁-C₂₀haloalkyl, e.g., —CF₃, —CN, —NO₂, —OR^{c}, —NR^{c}R^{c}, —(CH₂)ₙCOOR^{c}, —(CH₂)ₙ—C(═O)R^{c}, —(CH₂)ₙ—C(═O)NR^{c}R^{c}, C₁-C₂₀alkyl, C₂-C₂₀alkenyl, or C₂-C₂₀alkynyl;
each R^{c} is at each occurrence independently selected from H, C₁-C₂₀alkyl, C₂-C₂₀alkenyl, and C₂-C₂₀alkynyl, each optionally substituted by one or more R^{b}, e.g., one to six R^{b}; and
n is 0, 1, 2, 3, 4, 5 or 6, e.g., 0, 1, 2 or 3;
the process comprising the step of contacting nitromethane and an aldehyde or ketone substrate with the oxynit
rilase polypeptide according to any one of claims 1 to 13, to obtain a β-nitro alcohol product of formula (I-i), the aldehyde or ketone substrate having the formula (III),

[chemical structure]

28. The process according to any one of claims 23 to 27, wherein R¹ and R² are each independently selected from H, C₁-C₂₀alkyl, C₂-C₂₀alkenyl, C₂-C₂₀alkynyl, C₃-C₁₀cycloalkyl, C₆-C₁₄aryl, C₇-C₂₀arylalkyl, 3-14 membered heterocyclyl, and 5-20 membered heteroaryl,
wherein the C₁-C₂₀alkyl, C₂-C₂₀alkenyl, and C₂-C₂₀alkynyl are each optionally substituted by one to six R^{a},
wherein the C₃-C₁₀cycloalkyl, C₆-C₁₄aryl, C₇-C₂₀arylalkyl, 3-14 membered heterocyclyl, and 5-20 membered heteroaryl are each optionally substituted by one to six R^{b};
each R^{a} is at each occurrence independently selected from C₃-C₁₀cycloalkyl, C₆-C₁₄aryl, 3-14 membered heterocyclyl, 5-20 membered heteroaryl, halogen, e.g., F, haloalkyl, e.g., C₁-C₂₀haloalkyl, e.g., —CF₃, —CN, —OR^{c}, —NR^{c}R^{c}, —(CH₂)ₙCOOR^{c}, —(CH₂)ₙ—C(═O)R^{c}, —(CH₂)ₙ—C(═O)NR^{c}R^{c};
each R^{b} is at each occurrence independently selected from halogen, e.g., F, haloalkyl, e.g., C₁-C₂₀haloalkyl, e.g., —CF₃, —CN, —NO₂, —OR^{c}, —NR^{c}R^{c}, —(CH₂)ₙCOOR^{c}, —(CH₂)ₙ—C(═O)R^{c}, —(CH₂)ₙ—C(═O)NR^{c}R^{c}, C₁-C₂₀alkyl, C₂-C₂₀alkenyl, or C₂-C₂₀alkynyl;
wherein each R^{c} is at each occurrence independently selected from H, C₁-C₂₀alkyl, C₂-C₂₀alkenyl, and C₂-C₂₀alkynyl; and
n is 0, 1, 2, 3, 4, 5 or 6, e.g., 0, 1, 2 or 3.

29. The process according to any one of claims 23 to 28, wherein R¹ and R² are each independently selected from H, C₁-C₂₀alkyl, C₂-C₂₀alkenyl, C₂-C₂₀alkynyl, C₃-C₁₀cycloalkyl, C₆-C₁₄aryl, C₇-C₂₀arylalkyl, 3-14 membered heterocyclyl, and 5-20 membered heteroaryl,
wherein the C₁-C₂₀alkyl, C₂-C₂₀alkenyl, and C₂-C₂₀alkynyl are each optionally substituted by one to six R^{a},
wherein the C₃-C₁₀cycloalkyl, C₆-C₁₄aryl, C₇-C₂₀arylalkyl, 3-14 membered heterocyclyl, and 5-20 membered heteroaryl are each optionally substituted by one to six R^{b};
each R^{a} is at each occurrence independently selected from C₃-C₁₀cycloalkyl, C₆-C₁₄aryl, 3-14 membered heterocyclyl, 5-20 membered heteroaryl, halogen, e.g., F, haloalkyl, e.g., C₁-C₂₀haloalkyl, e.g., —CF₃, —CN, —OR^{c}, and —NR^{c}R^{c};
each R^{b} is at each occurrence independently selected from halogen, e.g., F, haloalkyl, e.g., C₁-C₂₀haloalkyl, e.g., —CF₃, —CN, —NO₂, —OR^{c}, —NR^{c}R^{c}, C₁-C₂₀alkyl, C₂-C₂₀alkenyl, and C₂-C₂₀alkynyl;
each R^{c} is at each occurrence independently selected from H, C₁-C₂₀alkyl, C₂-C₂₀alkenyl, and C₂-C₂₀alkynyl.

30. The process according to any one of claims 23 to 29, wherein R¹ and R² are each independently selected from H, C₁-C₂₀alkyl, C₃-C₁₀cycloalkyl, C₆-C₁₄aryl, C₇-C₂₀arylalkyl, 3-14 membered heterocyclyl, and 5-20 membered heteroaryl,
wherein the C₁-C₂₀alkyl is optionally substituted by one to six R^{a},
wherein the C₃-C₁₀cycloalkyl, C₆-C₁₄aryl, C₇-C₂₀arylalkyl, 3-14 membered heterocyclyl, and 5-20 membered heteroaryl are each optionally substituted by one to six R^{b},
each R^{a} is at each occurrence independently selected from halogen, e.g., F, C₁-C₂₀haloalkyl, e.g., —CF₃, —CN, —OR^{c}, and —NR^{c}R^{c};
each R^{b} is at each occurrence independently selected from halogen, e.g., F, haloalkyl, e.g., C₁-C₂₀haloalkyl, e.g., —CF₃, —CN, —NO₂, —OR^{c}, and —NR^{c}R^{c}; and
wherein each R^{c} is at each occurrence independently selected from H, and C₁-C₂₀alkyl.

31. The process according to any one of claims 23 to 30, wherein R¹ is selected from hydrogen, and C₁-C₂₀alkyl, wherein the C₁-C₂₀alkyl is optionally substituted by one to six R^{a},
and R² is C₁-C₂₀alkyl, wherein the C₁-C₂₀alkyl is optionally substituted by one to six R^{a},
wherein each R^{a} is at each occurrence independently selected from halogen, e.g., F, and C₁-C₂₀haloalkyl, e.g., C₁-C₂₀fluororalkyl, e.g., —CF₃.

32. The process according to any one of claims 23 to 31, wherein at least one of R¹ and R² is C₁-C₂₀fluoroalkyl, e.g., C₁-C₆fluoroalkyl.

33. The process according to any one of claims 23 to 32, wherein R¹ is selected from hydrogen, and C₁-C₆alkyl, wherein the C₁-C₆alkyl is optionally substituted by one to six F, and R² is C₁-C₆alkyl or phenyl.

34. The process according to any one of claims 23 to 33, wherein R¹ is selected from hydrogen, and trifuoromethyl, and R² is methyl or phenyl.

35. The process according to any one of claims 21 to 34, wherein the substrate is a ketone.

36. The process according to any one of claims 21 to 35, wherein the ketone substrate is

[chemical structure]

37. The process according to any one of claims 21 to 36, wherein the nitroalkane substrate is nitromethane or nitroethane.

38. A process for the asymmetric synthesis of (S)-1,1,1-trifluoro-2-methyl-3-nitropropan-2-ol (IA): [chemical structure]
the process comprising the step of contacting nitromethane and 1,1,1-trifluoropropan-2-one with the oxynitrilase polypeptide according to any one of claims 1 to 13, to obtain (S)-1,1,1-trifluoro-2-methyl-3-nitropropan-2-ol of formula (IA).

39. The process according to any one of claims 21 to 38, wherein the β-nitro alcohol is present in an enantiomeric excess of at least 60%, 70%, 80%, 85%, 90%, 91%, 92%, 93%, 94%, 95%, 96%, 97%, 98%, 99%, or more.

40. The process according to any one of claims 21 to 39, wherein the reaction is carried out in a solvent.

41. The process according to claim 40, wherein the solvent is selected from a polar solvent, non-polar solvent and ionic liquid.

42. The process according to any one of claims 21 to 41, wherein the reaction is carried out in a solvent, wherein the solvent is selected from water, methanol, ethanol, n-propanol, isopropanol, isopropyl acetate, dimethyl sulfoxide, dimethylformamide, ethyl acetate, butyl acetate, 1-octanol, hexane, heptane, octane, methyl tert-butyl ether, toluene, 1-ethyl-4-methylimidazolium tetrafluoroborate, 1-butyl-3-methylimidazolium tetrafluoroborate, 1-butyl-3-methylimidazolium hexafluorophosphate, glycerol, and polyethylene glycol.

43. The process according to any one of claims 40 to 42, wherein the reaction is carried out in the presence of a co-solvent.

44. The process according to claim 43, wherein the co-solvent is selected from dimethylsulfoxide (DMSO), and an alcohol, e.g., methanol, ethanol, n-propanol, isopropanol.

45. The process according to any one of claims 21 to 44, wherein the reaction is carried out at a temperature of 10 to 30° C.

46. The process according to any one of claims 21 to 45, wherein the reaction is carried out at a pH of 4.0 to 8.0.

47. The process according to any one of claims 21 to 46, wherein the aldehyde or ketone substrate is present at a loading of 5 g/L to 150 g/L.

48. The process according to any one of claims 21 to 47, wherein the nitroalkane is present at a loading of 5 g/L to 150 g/L.

49. The process according to any one of claims 21 to 48, wherein the nitroalkane is present in an excess of 2 stoichiometric equivalents relative to the aldehyde or ketone substrate.

50. The process according to any one of claims 21 to 49, wherein the oxynitrilase polypeptide is present at a concentration of at least 3 g/L enzyme.

51. The process according to any one of claims 21 to 50, wherein the solvent is present at a concentration of 0 to 500 g/L, e.g., 100 to 200 g/L, e.g., 196 g/L.

52. A process for synthesizing (S)-3-amino-1,1,1-trifluoro-2-methylpropan-2-ol of formula (IB): [chemical structure]
the process comprising the step of contacting (IA) with hydrogen under suitable hydrogenation conditions, to obtain (S)-3-amino-1,1,1-trifluoro-2-methylpropan-2-ol (IB), wherein (IA) is synthesized by the process according to any one of claims 21 to 51.

53. The process according to claim 52, wherein the reaction is carried out in the presence of a catalyst, optionally wherein the catalyst is selected from Raney nickel, Raney cobalt, Pd/C and Pt/C.

54. The process according to claim 53, wherein the catalyst is present at a loading of at least 2 wt. %, e.g., at least 5 wt. %, at least 10 wt. %.

55. The process according to any one of claims 52 to 54, wherein the reaction is carried out in the presence of activated charcoal.

56. The process according to any one of claims 52 to 55, wherein the reaction is carried out in a solvent, wherein the solvent is selected from water, methanol, ethanol, propanol, isopropanol, ethyl acetate, isopropyl acetate, tert-butyl methyl ether.

57. The process according to any one of claims 52 to 56, wherein the reaction is carried out at a temperature of 20 to 60° C., e.g., 20, 30, 40, 50° C.

58. The process according to any one of claims 52 to 57, wherein the compound of formula (IA) is present at a concentration of at least 2 wt. %, e.g., 2, 4, 8, 10 wt. %.

59. The process according to any one of claims 52 to 58, wherein the process is carried out in batch or flow.

60. The process according to any one of claims 52 to 59, further comprising the step of converting the compound of formula (IB) to an acid salt.

61. The process according to claim 60, further comprising the step of recrystallizing the acid salt.

62. The process according to any one of claims 60 and 61, wherein the acid salt is a HCl salt.

63. A process for synthesizing (S)-3-amino-6-methoxy-N-(3,3,3-trifluoro-2-hydroxy-2-methylpropyl)-5-(trifluoromethyl)picolinamide of formula (IC) [chemical structure]
the process comprising the step according to claim 38.

64. The process according to claim 63, further comprising the step according to any one of claims 39 to 51.

65. The process according to any one of claims 63 and 64, further comprising the step according to claim 52.

66. The process according to claim 65, further comprising the step according to any one of claims 53 to 62.
